(19) United States
(12) Patent Application Publication
(10) Pub. No.: US 2005/0003342 A1
(43) Pub. Date: Jan. 6, 2005

(54) Viral marker

(75) Inventors: Nick Davis Poynter, Newmarket (GB); Josephine Nugent, Newmarket (GB); Ian Birch-Machin, Newmarket (GB); George P. Allen, Lexington, KY (US)

Correspondence Address: NIXON & VANDERHYE, PC, 1100 N GLEBE ROAD, 8TH FLOOR, ARLINGTON, VA, 22201-4714, US

(73) Assignee: Animal Health Trust, Newmarket (GB)

(21) Appl. No.: 10/626,832

(22) Filed: Jul. 25, 2003

Related U.S. Application Data
(60) Provisional application No. 60/398,576, filed on Jul. 26, 2002.

(51) Int. Cl. C12Q 1/70

(52) U.S. Cl. 435/5

(57) ABSTRACT

The invention relates to herpesviruses genetic markers, and provides methods and materials for sub-typing, classifying, identifying or monitoring an Equine herpesvirus type 1 (EHV-1) isolate, the method comprising use of genetic markers shown in Table 5 (preferably those shown in ORF68). In another aspect the invention provides methods and materials for assessing the virulence of herpesviruses comprising the use of genetic markers (e.g. within the herpesvirus DNA polymerase (ORF30 in EHV-1). In another aspect the invention provides vaccines based on the manipulation of the markers disclosed.

### TECHNICAL FIELD

[0001] This invention relates to genetic markers that correlate with virulence capacity for herpesviruses and methods and materials employing these. It further relates to processes for producing viruses having reduced virulence, and compositions based on these having protective effect.

### BACKGROUND

[0002] Equine herpesvirus type 1 (EHV-1) is a highly prevalent equine pathogen that can present a variety of clinical symptoms, ranging from respiratory distress to the induction of abortion and occasionally neurological damage resulting in paralysis [1-5].

[0003] Two field isolates of EHV-1 have been characterised which typify the phenotypic characteristics of virulent (isolate AB4) and avirulent (isolate V592) strains. AB4 was originally isolated from a case of paralytic disease [11] and V592 from a multi-case outbreak of abortion, during which no neurological disease was reported [12]. Whereas AB4 infection results in severe disease, including abortion and paralysis, V592 infection results in relatively minor disease, largely restricted to a short-lived fever and mild respiratory disease; it does not result in neurological damage[8, 13]. The sequence of AB4 has been published [19, 20].

[0004] In order to assess the relative importance of EHV-1 strain variation upon disease outcome, it is important to be able to discriminate between groups of inter-related strains.

[0005] Previous studies have utilised DNA restriction fragment length polymorphism (RFLP) to separate field isolates of EHV-1 into sub-groups according to characteristic restriction enzyme site changes and the presence of variable numbers of copies of short sequence repeats. These studies have demonstrated that there is a relatively low frequency of mutation for EHV-1 and have suggested that distinct strains of EHV-1 exist in the field [14-18]. However, the relative lack of variation of EHV-1 sequences between strains has resulted in insufficient RFLP variants being identified to enable detailed epidemiological studies. Furthermore, although such analyses are useful for tracing the genetic relatedness of strains, they only allow identification of those changes resulting in restriction fragment variation, rather than the majority of changes that do not affect restriction sites.

[0006] Nugent et al (2001), in a poster and abstract (“Comparison between a paralytic and non-paralytic strain of EHV-1. Identification of variable sequence markers and their application in sub-typing of field isolates”) presented at the 26^{th} International Herpesvirus Workshop July 28^{th}-August 3^{rd}, Regensburg, Germany (www.ihw2001.de) compared the sequences of paralytic and non-paralytic strains of EHV to try and identify variable sequence markers. One of these (‘ORF68 (SQ1)’) was used to group 70 field isolates into 5 specific groups, certain of which suggested geographical restriction. However no distinct pattern of disease severity emerged from the grouping.

[0007] Genetic markers which permit the classification of herpesviruses are useful in grouping and identifying isolates. Markers which are strongly predictive of the severity of disease which a herpesvirus is capable of causing are useful e.g. in assessing the virulence of isolates, and also in engineering vaccines, for example which are attenuated or have modulated immunogenicity, CTL response, or immunopathology.

[0008] It will be apparent from the foregoing that the identification of one or more genetic markers which permit the classification of herpesviruses, and especially markers which are strongly predictive of the severity of disease which a herpesvirus is capable of causing would be a contribution to the art.

### DISCLOSURE OF THE INVENTION

[0009] In order to identify the genetic differences underlying the observed differences in pathogenic potential of these strains, the present inventors determined the complete genomic sequence of V592. This was compared with the published sequence of AB4 [19, 20] to establish regions of genetic heterogeneity between these strains, and to characterise a group of loci having sequence variation for a panel of EHV-1 field isolates from Great Britain and the U.S.A. These loci may be used to classify EHV-1 field isolates into different groupings.

[0010] The inventors further identified single nucleotide polymorphisms (specifying amino acid coding changes) of the DNA polymerase (DNA pol, ORF30, in region ORF30-ml). As described below the markers were present in isolates from paralytic outbreaks and did not tend to associate with any of the other variable sequence markers tested, indicating that this specific gene is likely to be a critical determinant of EHV-1 virulence.

[0011] One of these ORF30-ml region markers (at amino acid position 752 in EHV-1) occurs at a conserved position of the herpesvirus DNA polymerase. An alignment of the selected region for certain alpha, beta, gamma and unclassified herpesviruses is shown in Table 4. The sequence of the virulent strain AB4 (D₇₅₂), and the majority of ‘paralytic’ isolates tested, conforms to all of the herpesviruses DNA pol sequences shown in Table 4 (with the exception of PRV, which has a conserved amino acid substitution (E) at this position). In contrast, the sequence of V592 and the majority of other ‘non-paralytic’ isolates, encode N rather than D at this position.

[0012] Another ORF30-ml region marker (variant D760-G) was found in two ‘paralytic’ isolates which encode N rather than D at position 752, and may be a further marker for isolates with paralytic potential.

[0013] Since the DNA polymerase gene is present in all herpesviruses characterised to date and in view of the high level of conservation described above, the ORF30-ml region marker results of the present invention have implications for other herpesviruses (especially alphaherpesviruses) in addition to EHV-1 in the assessment of virulence, and identification of further markers for the same.

[0014] Previously, single amino acid changes of the DNA polymerase have been noted in Herpes simplex virus type 1 (HSV-1) which have given an attenuated phenotype. For example Larder et al (1986, J gen Virol. 67: 2501-2506) showed an attenuated mutation at amino acid position 597. Pelosi et al (1998, Virology 252: 364-372) showed reduced pathogenicity for position 842. Apart from the fact that both of these mutations are quite distinct and distant from that characterized in the present invention, it is also notable that these mutations were drug induced (i.e. not naturally occurring) and attenuation was not demonstrated in a natural host or in a natural environment. Therefore these mutations have no relevance to natural-strain typing or assessment, and their potential or otherwise for use in vaccines is unknown. Likewise mutations proximal to the paralytic marker position (D₇₅₂) (e.g. in domain II) have been noted which influence antiviral drug sensitivity for herpes simplex virus, varicella zoster virus and human cytomegalovirus [29, 30, 31 and references therein]. Aspects of the present invention relate, inter alia, to the use of an ORF30-ml region marker, such as the EHV-1 ORF30 amino acid 752 or 760 marker (or a related or corresponding HV marker) as a diagnostic tool for assessment of herpesvirus isolates with differing capacity to induce disease. Other aspects relate to the herpesvirus-derived proteins and nucleic acids modified in respect of the marker or region surrounding it. The invention also concerns recombinant virus strains, live viral vaccines, methods for making the strains and vaccines, and methods for immunizing a host against a virus.

[0015] In one aspect the present invention provides a method for assessing the virulence of an Equine herpesvirus isolate, the method comprising use of a genetic marker. In preferred embodiments this is a nucleic acid ORF30-ml region marker, particularly a polymorphic marker. Preferred Equine herpesvirus isolates which may be assessed are type 1 (EHV-1) and type 4 (EHV-4). EHV-4 is highly homologous to EHV-1 and naturally occurring isolates thereof are associated with different severities of disease.

[0016] By “ORF30-ml region” is meant the region extending from nucleotide 2251 to 2310, using the EHV-1 V592 numbering given herein.

[0017] A further aspect of the present invention provides a method for assessing the virulence of a herpesvirus isolate, the method comprising use of a marker (particularly a polymorphic marker) corresponding to an EHV-1 DNA pol ORF30-ml region marker.

[0018] By “corresponding to” is meant having an equivalent position when sequences are aligned to maximize identity (for example as shown herein in Table 4). Those skilled in the art are well able to make such alignments to find corresponding positions by eye or using commercially available software.

[0019] The ‘virulence’ of a herpesvirus is a measure of the severity of the disease which it is capable of causing in a susceptible host. As those skilled in the art are aware, this is likely to be influenced by a number of factors, including the age and physical condition of the host, whether the infection is primary, secondary or a reactivation of latent virus, the immune status of the host etc. Thus virulence can not be an absolute measure, and the presence of any given marker does not mean that infection with that isolate inevitably results in clinical signs of disease. Nevertheless the methods of the invention can be used to compare the virulence of different strains, or predict the severity of disease which the virus is capable of causing in a given host, subject to correction or normalisation of other contributory or protective factors.

[0020] In preferred embodiments the method may in particular be used to assess “neurovirulence” by which is meant its potential to cause neurological damage e.g. paralytic disease. For example, where the virus is a strain of EHV-1, earlier studies of the pathogenesis of EHV-1 infection, in particular relating to induction of abortion and neurological damage, have demonstrated that virulent strains are ‘endotheliotropic’, displaying the ability to disseminate to and establish infection at vascular endothelial sites, in particular within the endometrium and CNS [6-10]. Thus the methods of the present invention may be utilised to assess the degree to which that virus is endotheliotropic.

[0021] Indeed the fact that there is such a strong association between herpesvirus sequence markers and paralytic disease suggests strongly that the viral genotype, rather than other environmental or host factors, is the predominant determinant of whether infection will result in paralytic or non-paralytic disease outbreaks.

[0022] As used in the present application, the term “marker” refers generally to the difference or differences between the nucleotide sequence of different groupings of herpesvirus. As described herein, markers may be associated with different strains and isolates, or with different levels of virulence. In certain embodiments the marker may be a virulence marker, which is a nucleotide sequence difference between a virulent form of a herpesvirus and the nucleotide sequence of a corresponding strain having reduced virulence. As discussed below, the marker can be a single difference (one point difference) in a nucleotide sequence or differences in more than one nucleotide, wherein the different nucleotides are located in close proximity to each other.

[0023] Thus in other aspects the method provides for classifying a herpesvirus isolate in terms of virulence described above, the method comprising use of a marker as discussed herein.

[0024] In one preferred form the method relates to the EHV-1 ORF30-ml region marker at amino acid position 752 (based on the V592 numbering—see SEQ. ANNEX 1 and SEQ. ANNEX 3b) or one which corresponds to this when sequences are aligned as shown herein (see Table 4).

[0025] In another preferred form the method relates to the EHV-1 ORF30-ml region marker at amino acid position 760 or one which corresponds to this when sequences are aligned as shown herein (see Table 4).

[0026] Where amino acid or nucleotide positions are discussed hereinafter with reference to EHV-1, it will be understood that these discussions apply also to the corresponding position in other herpesvirus DNA polymerase sequences.

[0027] A comparison between herpesvirus DNA polymerase sequences and those of other related polymerases (from organisms as diverse as bacteriophage and mammals) has revealed a number of conserved domains [27, 28]. The ORF30-ml region lies between the conserved domains designated II and VI, which comprise core, catalytic regions essential for DNA polymerase activity. Thus, although this position is not within one of the domains known to be critical for function, it does lie within the core, catalytic region of the enzyme and it is therefore likely that coding change results in a change in functional properties of the enzyme and therefore plays a direct role in the aetiology of disease. However, irrespective of the precise underlying mechanism, the marker has utility in the methods described herein. Sequence variation at this marker position has not previously been noted for any other herpesvirus where multiple isolates have been analysed (e.g. human cytomegalovirus [29]).

[0028] Preferably the presence of an acidic amino acid at position 752 (e.g. glutamic acid ‘E’, or more preferably aspartic acid ‘D’) is correlated with higher virulence of the herpesvirus.

[0029] Preferably the presence of a non-acidic amino acid at position 760 (e.g. glycine ‘G’)is correlated with higher virulence of the herpesvirus.

[0030] In preferred embodiments the nucleotide sequence (codon) encoding the amino acid will be assessed.

[0031] The invention thus employs the identity of a codon at nucleotide positions 2254-2256 or 2278-2280 (based on the EHV-1 V592 numbering—see SEQ. ANNEX 1 and SEQ. ANNEX 3a) or one which corresponds to this when sequences are aligned.

[0032] Thus, preferably the presence of an ‘G’ at position 2254 is correlated with higher virulence of the herpesvirus.

[0033] Thus, preferably the presence of an ‘G’ at position 2279 is correlated with higher virulence of the herpesvirus.

[0034] Regarding marker G₂₂₅₄, this shows an especially strong predictive value as a marker of isolates capable of causing paralytic disease in EHV-1. The fact that it does not co-segregate with the other markers tested (although the majority of these other markers do tend to co-segregate with each other according to the groupings described in FIG. 1) suggests that it may arise ‘spontaneously’ rather than being inherited along with other markers for a specific group of related EHV-1 strains. In particular, it is significant that ORF30 G₂₂₅₄ does not co-segregate with another ORF30 marker (G-A₂₉₆₈), which is separated by a distance of only 714 nucleotides.

[0035] For brevity hereinafter, the term “ORF30-ml region virulence marker” may be used (except when context demands otherwise) to describe not only markers from EHV-1 such as those found at nucleotide positions 2254-2256 (preferably 2254 discussed above) positions 2278-2280 (preferably 2279 discussed above) but also virulence markers from corresponding DNA pol regions from other herpesviruses, especially alphaherpesviruses (which may or may not be termed “ORF30” therein, see Table 4). Likewise where positions are cited (amino acid or nucleotide e.g. 752 or 760, or 2254 or 2279) in relation to EHV-1 markers, the corresponding positions from other herpesviruses, especially alphaherpesviruses, are included. Likewise, discussions of embodiments with respect to EHV apply to EHV-1 and EHV-4, and correspondingly to other herpesviruses.

[0036] The method of the aspects above may comprise:
[0037] (i) providing a sample of nucleic acid from the herpesvirus isolate, and,
[0038] (ii) establishing the presence or identity of one or more DNA pol (ORF30) markers in the nucleic acid sample, preferably an ORF30-ml region virulence marker.

[0039] Preferred methods for detecting and determining markers such as SNP markers are described in more detail hereinafter.

[0040] As will be understood by those skilled in the art, where the term ‘isolate’ is used this should not be taken as requiring that the virus be in pure form. For examples the virus may be present in a sample e.g. an environmental or biopsy sample. The method may be preceded by a culturing step in order to cause or permit replication of herpesviruses in a sample. For example, for EHV, equine fibroblasts may be infected and incubated (37° C.) until 50-100% c.p.e. had developed. Cells can then be pelleted by centrifugation, washed with TE buffer and resuspended in Proteinase K/SDS solution 0.1 mg/ml Proteinase K, 0.5% SDS). Following 1-2 hours digestion, DNA can be prepared by phenol/chloroform extraction followed by ethanol precipitation. Purified DNA is then re-dissolved in TE buffer.

[0041] Equally the isolate may be latent i.e. nucleic acid harboured within a host cell. Thus in one embodiment, the methods of the invention are used to characterise herpesvirus (e.g. EHV) strains harboured latently e.g. via PCR amplification and sequencing of the ORF30-ml region from peripheral blood mononuclear cells (a site of EHV-1 latency). For example methods described by Welch et al (1992, J Gen Virol 73:261-268) could be used, or methods analogous to these.

[0042] Determination of whether horses are infected with potentially paralytic strains of EHV-1 will be useful in refining management procedures, for example employing appropriate isolation procedures to limit the risk of such animals undergoing reactivation of the latent virus and hence transmitting ‘paralytic’ EHV strains to susceptible animals (in particular pregnant mares).

[0043] The identification of a marker linked to paralytic disease has important implications for current and future live HV vaccines. In view of the risk of reversion to virulence of a live attenuated strain, or recombination between an attenuated vaccine strain and virulent field strain, vaccine strains can be screened for the presence of markers disclosed herein.

[0044] The prerequisite for a useful HV mutant vaccine is that the mutation is incorporated in a permissive position or region of the HV genome, i.e. a position or region which can be used for the incorporation of the mutation without disrupting essential functions of HV such as those necessary for infection or replication.

[0045] Preferred live vaccines of the present invention may be those which that are engineered in the light of the disclosure herein to carry reduced-virulence ORF30-ml region virulence markers (e.g. the marker sequence of V592, wherein position 752 is a non-acidic side chain amino acid i.e. one which does not have a negative charge at neutral pH, and position 760 is an acidic side chain amino acid).

[0046] Thus the present invention relates to recombinant herpesvirus strains, live viral vaccines incorporating such strains, methods for making such strains and vaccines, and methods for immunizing a host against herpesvirus infection using the vaccines wherein the viral DNA encodes a gene product modified in respect of one or more ORF30-ml region virulence markers.

[0047] For example the invention provides an EHV vaccine based on an EHV genome consisting essentially of an EHV which has reduced virulence as a result of its DNA POL (ORF30)gene having at least one, preferably two, attenuating mutations (e.g. substitution or deletion) at ORF30-ml region virulence marker sites. The genome may be otherwise virulent, or may include other attenuating modifications.

[0048] Alternatively, methods of preparing vaccines according to the present invention may include making a modification within about 1,2,3,4,5,10 or 15 amino acids or codons of an ORF30-ml region virulence marker disclosed herein.

[0049] A method for preparing a vaccine according to the present invention may include the steps of:
[0050] (i) providing nucleic acid from an herpesvirus genome,
[0051] (ii) modifying the DNA POL gene of the herpesvirus to reduce the virulence of the gene product of said gene, said modification being within an ORF30-ml region virulence marker or the range defined above of that marker; and,
[0052] (iii) combining the modified virus encoded by the genome with a pharmaceutically acceptable diluent, adjuvant, or carrier.

[0053] Preferably the modification is selected from the group consisting of insertions, substitutions, and deletion at the position 752 or 760 markers described herein, most preferably the 752 marker. Preferably the modifying step comprises the step of substituting one or more nucleotides within the marker. Recombinant HV (for example) may be prepared by recombination between modified plasmid and full length viral DNA (following cotransfection) or by manipulation of a full length infectious clone of HV (e.g. a BAC clone)—see e.g. Seyboldt et al (2000) Virology 278: 477-489, or Rudolph et al (2002) J Vet Med B Infect Dis Vet Public Health 49: 31-36.

[0054] Preferably the herpesvirus is EHV (e.g. EHV-1). For the preparation of a live vaccine the EHV mutant according to the present invention can be grown on a cell culture of equine origin or on cells from other species. The viruses thus grown can be harvested by collecting the tissue cell culture fluids and/or cells.

[0055] The live vaccine may be prepared in the form of a suspension or may be lyophilized. In addition to an immunogenically effective amount of the HV mutant vaccine may contain a pharmaceutically acceptable carrier or diluent, as described below.

[0056] HV mutants according to the invention can also be used to prepare an inactivated vaccine.

[0057] One explanation for the increased virulence of herpesviruses having the AB4 sequence is that immune responses against e.g. EHV-1 encoding the DNA polymerase D₇₅₂ marker may be modified compared with those to EHV-1 carrying the N₇₅₂ marker, either resulting in less efficient clearance of virus infected cells or more severe immunopathology at the sites of virus infection.

[0058] For example the region of DNA polymerase including amino acid position 752 and\or 760 may be a CTL epitope, and variations at these positions may modify induction of, or susceptibility to, CTL responses.

[0059] For example if the majority of EHV-1 isolates in the field carry the N₇₅₂ marker, then horses will tend to be naturally primed (via infection) to the ‘non-paralytic’ CTL epitope and hence may be less able to clear infection from those isolates carrying the ‘paralytic’ marker, due to the lack of CTLs primed against the ‘paralytic’ epitope.

[0060] If this is the case, then it may be desired to improve protection against paralytic EHV-1 disease by specific vaccination designed to prime CTL responses against the DNA pol epitope found in ‘paralytic’ strains. This is achieved by incorporation of the DNA pol sequence, or a region comprising the minimal CTL epitope including amino acid position 752 (from AB4) and\or 760 (from T937 or T949, isolates from the US99/3/2 and US02/1/2 outbreaks respectively—see FIG. 1) or both, in a vaccine formulation capable of stimulating CTL responses (e.g. delivery by ISCOMs, plasmid DNA or recombinant virus vaccines).

[0061] As is well known to those skilled in the art, CTL inducing peptides are typically small peptides that are derived from selected epitopic regions of target antigens associated with an effective CTL response to the disease of interest. Thus, by “CTL inducing peptide” or “CTL peptide” of the present invention is meant a chain of at least four amino acid residues, preferably at least six, more preferably eight to ten, sometimes eleven to fourteen residues, and usually fewer than about thirty residues, more usually fewer than about twenty-five, and preferably fewer than fifteen, e.g. eight to fourteen amino acid residues derived from selected epitopic regions of the virulent marker sequence.

[0062] The precise size of an optimum epitope including the marker can be determined by assessing its ability to stimulate CTL responses against EHV-1 infected target cells or to serve as a target for CTLs naturally primed by EHV-1 infection. Optionally comparisons can be made with a ‘non-paralytic’ sequence exemplified by V592.

[0063] Thus the present invention provides vaccines (e.g. attenuated in respect of the markers disclosed herein or CTL-inducing vaccines) optionally accompanied by a pharmaceutically acceptable diluent, adjuvant or carrier as described above. Thus a process for producing the same by combining said vaccines with the pharmaceutically acceptable ingredients are also provided.

[0064] The prophylactic and therapeutic materials discussed above and based on the markers disclosed herein may be formulated with appropriate carriers. For example dispersions can be prepared in glycerol, liquid polyethylene glycols, and mixtures thereof, and in oils. Under ordinary conditions of storage and use, these preparations can contain a preservative to prevent the growth of microorganisms. The pharmaceutical forms suitable for injectable use include sterile aqueous solutions (where water soluble) or dispersions and sterile powders for the extemporaneous preparation of sterile injectable solutions or dispersion. In all cases the form must be sterile and must be fluid to the extent that easy syringability exists. It must be stable under the conditions of manufacture and storage and must be preserved against the contaminating action of microorganisms such as bacteria and fungi. The carrier can be a solvent or dispersion medium containing, for example, water, ethanol, polyol (for example, glycerol, propylene glycol, liquid polyethylene glycol, and the like), suitable mixtures thereof and vegetable oils. The proper fluidity can be maintained, for example, by the use of a coating such as lecithin, by the maintenance of the required particle size in the case of dispersion and by the use of surfactants. The preventions of the action of microorganisms can be brought about by various antibacterial and antifungal agents, for example, parabens, chlorobutanol, phenol, sorbic acid, thimerosal, and the like. In many cases it may be preferable to include isotonic agents, for example, sugars or sodium chloride.

[0065] Prolonged absorption of the injectable compositions can be brought about by the use in the compositions of agents delaying absorption, for example, aluminum monostearate and gelatin. Sterile injectable solutions are prepared by incorporating the active compounds in the required amount in the appropriate solvent with various of the other ingredients enumerated above, as required, followed by filtered sterilization. Generally, dispersions are prepared by incorporating the various sterilized active ingredients into a sterile vehicle which contains the basic dispersion medium and the required other ingredients from those enumerated above. In the case of sterile powders for the preparation of sterile injectable solutions, the preferred methods of preparation are vacuum-drying and the freeze-drying technique which yield a powder of the active ingredient plus any additional desired ingredient from previously sterile-filtered solution thereof.

[0066] Thus examples of pharmaceutically acceptable carriers or diluents useful in the present invention include stabilizers such as SPGA, carbohydrates (e.g. sorbitol, mannitol, starch, sucrose, glucose, dextran), proteins such as albumin or casein, protein containing agents such as bovine serum or skimmed milk and buffers (e.g. phosphate buffer). Optionally, one or more compounds having adjuvant activity may be added to the vaccine. Suitable adjuvants are for example aluminium hydroxide, phosphate or oxide, oil-emulsions. Adjuvants contemplated herein include resorcinols, non-ionic surfactants such as polyoxyethylene oleyl ether and n-hexadecyl polyethylene ether.

[0067] As used herein “pharmaceutically acceptable carrier” includes any and all of these solvents, dispersion media, coatings, antibacterial and antifungal agents, isotonic and adsorption delaying agents, and the like described above. Supplementary active ingredients can also be incorporated into the compositions.

[0068] The active compounds for vaccination or passive immunization may be administered in a convenient manner such as by intravenous (where water soluble), intramuscular, subcutaneous, intranasal, or intradermal routes. Intramuscular administration is a preferred method of administration but other methods are also contemplated by the present invention. The active compounds may also be administered parenterally or intraperitoneally.

[0069] It is especially advantageous to formulate parenteral compositions in dosage unit form for ease of administration and uniformity of dosage. Dosage unit form as used herein refers to physically discrete units suited as unitary dosages for the mammalian subjects to the treated; each unit containing a predetermined quantity of the active material calculated to produce the desired therapeutic effect in association with the required pharmaceutical carrier. The specification for the novel dosage unit forms of the invention are dictated by and directly depend on (a) the unique characteristics of the active material and the particular therapeutic effect to be achieved, and (b) the limitations inherent in the art of compounding such active material for the treatment of disease.

[0070] The principal active ingredient is compounded for convenient and effective administration in effective amounts with a suitable pharmaceutically acceptable carrier in dosage unit form as hereinbefore disclosed. A unit dosage form can, for example, contain the principal active compound in amounts ranging from 0.5 μg to about 2000 mg. Expressed in proportions, the active compound is generally present in from about 10 μg to about 2000 mg/ml of carrier. In the case of compositions containing supplementary active ingredients, the dosages are determined by reference to the usual dose and manner of administration of the said ingredients.

[0071] The useful dosage to be administered will vary depending on the age and weight of the animal, and mode of administration. A suitable dosage can range for example from 10³ to 10⁸ TCID₅₀ (preferably around 10⁶ TCID₅₀) of the EHV mutant per horse.

[0072] The present invention further provides methods for immunizing a host against a herpesvirus which include a step of inoculating the host with an immunity-inducing dose of a vaccine as described above. For example, a live EHV mutant according to the present invention can be used to vaccinate horses.

[0073] Also provided are vaccines for use in such methods, and vaccines (or modified herpesviral genomes) for use in the preparation of such vaccines.

[0074] Although not wishing to be bound by any particular theory the ORF30 coding change corresponding to the ORF30-ml region virulence marker s described herein may result in a change in functional properties of the DNA polymerase which plays a direct role in the aetiology of paralytic disease. Such functional differences in ORF30 may affect replication, for example in specific cell types or in the context of tissues in vivo.

[0075] In particular, ORF30 may play a role during establishment of, or reactivation from, latency. Thus, establishment of latency may result following ‘abortive’ replication, if DNA pol activity is insufficient to promote full late gene expression prior to the genome entering a quiescent state; conversely, during the early stages of reactivation, DNA pol activity may be critical in triggering full lytic cycle gene expression. An effect upon latency/reactivation would be consistent with the apparent ‘independence’ of the ORF30-ml region virulence markers compared with the other markers tested, if isolates carrying this marker are attenuated for establishment of, or reactivation from, latency.

[0076] Either cell-specific replication differences or modulation of latency/reactivation may be relevant to the efficiency with which EHV-1 infected lymphocytes (a major source of infectious virus carried via cell-associated viraemia and a major site of EHV-1 latency) transfer virus to vascular endothelial cells of blood vessels serving the CNS, infection of which is a consistent feature of paralytic disease. If the ‘paralytic’ marker enables virus strains to replicate more rapidly in critical cell types (eg. respiratory epithelia, lymphocytes or endothelial cells), then this may result in increased viral load being delivered to, or replicating in, the vascular endothelia. Similarly, if strains carrying the paralytic marker tend to establish lytic, rather than latent, infection of lymphocytes, then this may result in a higher proportion of infected lymphocytes undergoing active virus replication and hence delivering infectious virus to the vascular endothelia with higher efficiency.

[0077] The invention also provides materials which may be used in the methods disclosed herein. These include isolated nucleic acid molecules consisting of the DNA sequence of EHV-1 (strain V592) ORF30 shown in SEQ. ANNEX 3, which sequence comprises a mutation which reduces the virulence of the gene product.

[0078] Also provided are isolated peptides comprising, or consisting of, or consisting essentially of, a contiguous portion of at least 10, 15, 20, 30, 40, or 50 amino acids of the amino acid sequence of an EHV-1 strain (preferably strain V592) ORF30 shown in SEQ. ANNEX 3, wherein the portion includes position 752 or 760 of SEQ. ANNEX 3.

[0079] Such peptides and nucleic acids according to the present invention may be provided isolated and/or purified from their natural environment, in substantially pure or homogeneous form, or free or substantially free of other nucleic acids of the species of origin. Where used herein, the term “isolated” encompasses all of these possibilities.

[0080] The invention further provides oligonucleotides for use in probing or amplification reactions which are selective for the markers described herein.

[0081] An oligonucleotide for use in nucleic acid amplification may be about 30 or fewer nucleotides in length (e.g. 18, 21 or 24). Generally specific primers are upwards of 14 nucleotides in length, but need not be than 18-20. The oligonucleotides bind to regions in close proximity to the marker under investigation. The region amplified by PCR technology will usually have a length of about 60 to 600 nucleotides. Those skilled in the art are well versed in the design of primers for use processes such as PCR. Various techniques for synthesizing oligonucleotide primers are well known in the art, including phosphotriester and phosphodiester synthesis methods.

[0082] Preferred primers for the amplification of regions of variable sequence for several ORFs are shown in SEQ. ANNEX 2. Of these, the primers for amplification of the ORF30-ml marker region (ORF30f, ORF30r) and of the ORF68 marker region (ORF68f, ORF68r) are particularly preferred.

[0083] Primers complementary to those disclosed herein are also embraced by the present invention. By the term “complementarity” is meant a sufficient number in the oligonucleotide of complementary base pairs in its sequence to interact specifically (hybridize) with the target nucleic acid sequence of the herpesvirus to be amplified or detected. As known to those skilled in the art, a very high degree of complementarity is needed for specificity and sensitivity involving hybridization, although it need not be 100%. Thus, for example, an oligonucleotide which is identical in nucleotide sequence to an oligonucleotide disclosed herein, except for one base change or substitution, may function equivalently to the disclosed oligonucleotides.

[0084] Compositions of such oligonucleotides are also provided. By the term “composition” is meant a combination of elements which may include one or more of the following: the reaction buffer for the respective method of enzymatic amplification, plus one or more oligonucleotides specific for the herpesvirus marker labeled with a detectable moiety.

[0085] Nucleic acid for use in the methods of the present invention, such as an oligonucleotide probe and/or pair of amplification primers, may be provided in isolated form and may be part of a kit, e.g. in a suitable container such as a vial in which the contents are protected from the external environment. The kit may include instructions for use of the nucleic acid, e.g. in PCR and/or a method for determining the presence of nucleic acid of interest in a test sample. A kit wherein the nucleic acid is intended for use in PCR may include one or more other reagents required for the reaction, such as polymerase, nucleosides, buffer solution etc. The nucleic acid may be labelled. A kit for use in determining the presence or absence of nucleic acid of interest may include one or more articles and/or reagents for performance of the method, such as means for providing the test sample itself

[0086] The present invention is particularly directed to a kit for typing or assessing the virulence of herpesviruses. When the diagnostic test is based on polymerase chain reaction (PCR) technology, the kit will contain at least a first oligonucleotide which selectively binds to DNA on the 3′ side of the marker and a second oligonucleotide which selectively binds to DNA on the 5′ side of the marker. More specifically two oligonucleotides flank the marker sequence, bind to the opposite strands of DNA and serve as primers for PCR leading to amplification of marker-containing DNA sequence.

[0087] Identification of multiple positions of sequence variation between EHV-1 (V592) and strain (AB4) has demonstrated their usefulness as a method for sub-typing EHV-1 isolates recovered from the field, via multi-locus sequence typing. These methods will be useful therefore in tracing the transmission of virus strains between outbreaks and, in horse populations where live EHV-1 vaccination is employed, determining whether outbreaks result from reversion to virulence of the vaccine strain.

[0088] Thus the use of any marker based upon ORF sequences which vary between AB4 and V592 disclosed in Table 2 for detecting the presence of, classifying, grouping, identifying or monitoring an EHV isolate forms one aspect of the present invention. Nucleotide sequence variation for selected marker regions, including positions of nucleotide polymorphism in addition to those noted between AB4 and V592, are disclosed in Table 5.

[0089] A preferred marker is that which appears in ORF68. Polymorphisms within this gene noted in Table 5 are preferred e.g. at nucleotide positions (numbered according ot the AB4 ORF68 sequence) 336, 344, 629, 710, 713, 719, 731-740, 755. In preferred embodiments the marker is used to classify the isolate into one of the 6 groups shown in FIG. 1. As described in Example 4 below, the ORF68 region permits the identification of six major, distinct, groups of related strains (on the basis of ORF68 sequences and supported by other markers tested), isolated from outbreaks that have occurred over the course of 20-30 years.

[0090] Some preferred techniques for use in the methods of the present invention will now be discussed in more detail.

[0091] General methods for assessment of polymorphisms are reviewed by Schafer and Hawkins, (Nature Biotechnology (1998)16, 33-39, and references referred to therein) and include: oligonucleotide probing, amplification using PCR, denaturing gradient gel electrophoresis, RNase cleavage, chemical cleavage of mismatch, T4 endonuclease VII cleavage, multiphoton detection, cleavase fragment length polymorphism, E. coli mismatch repair enzymes, denaturing high performance liquid chromatography, (MALDI-TOF) mass spectrometry, analysing the melting characteristics for double stranded DNA fragments as described by Akey et al (2001) Biotechniques 30; 358-367. These references, inasmuch as they be used in the performance of the present invention by those skilled in the art, are specifically incorporated herein by reference.

[0092] The assessment of polymorphisms may be carried out on a DNA microchip, if appropriate. One example of such a microchip system may involve the synthesis of microarrays of oligonucleotides on a glass support. Fluorescently-labelled PCR products may then be hybridised to the oligonucleotide array and sequence specific hybridisation may be detected by scanning confocal microscopy and analysed automatically (see Marshall & Hodgson (1998) Nature Biotechnology 16: 27-31, for a review).

[0093] Use of Nucleic Acid Probes

[0094] The method of assessment of the polymorphism may comprise determining the binding of an oligonucleotide probe to the nucleic acid sample. The probe may comprise a nucleic acid sequence which binds specifically to a particular marker polymorphism (e.g. G) and does not bind specifically to other possible base identities at the polymorphism (e.g. A). Where the nucleic acid is double-stranded DNA, hybridisation will generally be preceded by denaturation to produce single-stranded DNA. A screening procedure, chosen from the many available to those skilled in the art, is used to identify successful hybridisation events and isolated hybridised nucleic acid.

[0095] Probing may employ the standard Southern blotting technique. For instance DNA may be extracted from cells and digested with different restriction enzymes. Restriction fragments may then be separated by electrophoresis on an agarose gel, before denaturation and transfer to a nitrocellulose filter. Labelled probe may be hybridised to the DNA fragments on the filter and binding determined.

[0096] Where the term “label” or “labelled” is used herein this refers to a detectable molecule which is incorporated indirectly or directly into an oligonucleotide, wherein the label molecule facilitates the detection of the oligonucleotide. Methods of producing labelled probes (or primers—see below) are well known to those skilled on the art (See for example, Molecular Cloning, a laboratory manual: editors Sambrook, Fritsch, Maniatis; Cold Spring Harbor Laboratory Press, 1989; BioTechniques “Producing single-stranded DNA probes with the Taq DNA polymerase: a high yield protocol,” 10:36, 1991). Alternatively, the detectable moiety may be incorporated directly or indirectly such as, for example, by biotinylating the 5′ aminogroup of the oligonucleotide with sulfo-NHS-biotin. Other label molecules, known to those skilled in the art as being useful for detection, include radioactively, fluorescently or enzymatically labelled molecules. Various fluorescent molecules are known in the art which are suitable for use to label a nucleic acid substrate for the method of the present invention. Fluorescent molecules used as labels may include amine-reactive molecules which are reactive to end terminal amines of the substrate; sulfonyl chlorides which are conjugated to the substrate through amine residues; and the like. Depending on the fluorescent molecule used, incorporating the substrate with the fluorescent molecule label include attachment by covalent or noncovalent means. The protocol for such incorporation may vary depending upon the fluorescent molecule used. Such protocols are known in the art for the respective fluorescent molecule.

[0097] Binding of a probe to target nucleic acid (e.g. DNA) may be measured using any of a variety of techniques at the disposal of those skilled in the art.

[0098] Polymorphisms may be detected by contacting the sample with one or more labelled nucleic acid reagents including recombinant DNA molecules, cloned genes or degenerate variants thereof under conditions favorable for the specific annealing of these reagents to their complementary sequences within the relevant gene. Preferably, the lengths of these nucleic acid reagents are at least 15 to 30 nucleotides. After incubation, all non-annealed nucleic acids are removed from the nucleic acid:gene hybrid. The presence of nucleic acids that have hybridized, if any such molecules exist, is then detected. Using such a detection scheme, the nucleic acid from the cell type or tissue of interest can be immobilized, for example, to a solid support such as a membrane, or a plastic surface such as that on a microtitre plate or polystyrene beads. In this case, after incubation, non-annealed, labeled nucleic acid reagents are easily removed. Detection of the remaining, annealed, labeled nucleic acid reagents is accomplished using standard techniques well-known to those in the art. The gene sequences to which the nucleic acid reagents have annealed can be compared to the annealing pattern expected from a normal gene sequence in order to determine whether a gene mutation is present.

[0099] Approaches which rely on hybridisation between a probe and test nucleic acid and subsequent detection of a mismatch may be employed. Under appropriate conditions (temperature, pH etc.), an oligonucleotide probe will hybridise with a sequence which is not entirely complementary. The degree of base-pairing between the two molecules will be sufficient for them to anneal despite a mis-match. Various approaches are well known in the art for detecting the presence of a mis-match between two annealing nucleic acid molecules. For instance, RN'ase A cleaves at the site of a mis-match. Cleavage can be detected by electrophoresing test nucleic acid to which the relevant probe or probe has annealed and looking for smaller molecules (i.e. molecules with higher electrophoretic mobility) than the full length probe/test hybrid. Other approaches rely on the use of enzymes such as resolvases or endonucleases.

[0100] Thus, an oligonucleotide probe that has the sequence of a region of the marker described herein (either sense or anti-sense strand) may be annealed to test nucleic acid and the presence or absence of a mis-match determined. Detection of the presence of a mis-match may indicate the presence in the test nucleic acid of a mutation associated with the trait.

[0101] Those skilled in the art are well able to employ suitable conditions of the desired stringency for selective hybridisation, taking into account factors such as oligonucleotide length and base composition, temperature and so on.

[0102] Suitable selective hybridisation conditions for oligonucleotides of 17 to 30 bases include hybridization overnight at 42° C. in 6× SSC and washing in 6× SSC at a series of increasing temperatures from 42° C. to 65° C. One common formula for calculating the stringency conditions required to achieve hybridization between nucleic acid molecules of a specified sequence homology is (Sambrook et al., 1989): Tₘ=81.5° C.+16.6Log [Na+]+0.41(% G+C)−0.63(% formamide)−600/#bp in duplex. Other suitable conditions and protocols are described in Molecular Cloning: a Laboratory Manual: 2nd edition, Sambrook et al., 1989, Cold Spring Harbor Laboratory Press and Current Protocols in Molecular Biology, Ausubel et al. eds., John Wiley & Sons, 1992.

[0103] Amplification-Based Methods

[0104] The hybridisation of such a probe may be part of a PCR or other amplification procedure. Accordingly, in one embodiment the method of assessing the polymorphism includes the step of amplifying a portion of the ORF30 gene or other gene containing the marker of interest (e.g. an ORF30-ml region virulence marker).

[0105] The assessment of the polymorphism in the amplification product may then be carried out by any suitable method, e.g., as described herein. An example of such a method is a combination of PCR and low stringency hybridisation with a suitable probe. Unless stated otherwise, the methods of assessing the polymorphism described herein may be performed on a genomic DNA sample, or on an amplification product thereof.

[0106] Where the method involves PCR, or other amplification procedure, any suitable PCR primers may be used. Example primers are described herein. For example primers are shown in SEQ. ANNEX 2. Preferred primers are any of those listed as ORF30f, ORF30r, ORF68f and ORF68r.

[0107] Suitable polymerase chain reaction (PCR) methods are reviewed, for instance, in “PCR protocols; A Guide to Methods and Applications”, Eds. Innis et al, 1990, Academic Press, New York, Mullis et al, Cold Spring Harbor Symp. Quant. Biol., 51:263, (1987), Ehrlich (ed), PCR technology, Stockton Press, N.Y., 1989, and Ehrlich et al, Science, 252:1643-1650, (1991)). PCR comprises steps of denaturation of template nucleic acid (if double-stranded), annealing of primer to target, and polymerisation. An amplification method may be a method other than PCR. Such methods include strand displacement activation, the QB replicase system, the repair chain reaction, the ligase chain reaction, rolling circle amplification and ligation activated transcription. For convenience, and because it is generally preferred, the term PCR is used herein in contexts where other nucleic acid amplification techniques may be applied by those skilled in the art. Unless the context requires otherwise, reference to PCR should be taken to cover use of any suitable nucleic amplification reaction available in the art.

[0108] A preferred method for detecting the presence or absence of EHV-1 carrying the specified marker in a sample comprises the steps of:
[0109] (a) lysing the cells in a sample to release nucleic acid molecules;
[0110] (b) contacting the nucleic acid molecules with oligonucleotide primers as described herein under suitable conditions permitting hybridization of the oligonucleotides to the nucleic acid molecules;
[0111] (c) enzymatically amplifying a specific region of the nucleic acid molecules comprising the marker sequences using said oligonucleotides as primers;
[0112] (d) determining the identity of the marker in the amplified sequences
   Sequencing

[0114] The polymorphism may be assessed or confirmed by nucleotide sequencing of a nucleic acid sample to determine the identity of a polymorphic allele. The identity may be determined by comparison of the nucleotide sequence obtained with a sequence shown herein.

[0115] Preferred sequencing primers include any of those shown in SEQ. ANNEX 2, particularly ORF30s, ORF68s1, ORF68s2 and ORF68s3.

[0116] Mobility Based Methods

[0117] The assessment of the polymorphism may be performed by single strand conformation polymorphism analysis (SSCP). In this technique, PCR products from the region to be tested are heat denatured and rapidly cooled to avoid the reassociation of complementary strands. The single strands then form sequence dependent conformations that influence gel mobility. The different mobilities can then be analysed by gel electrophoresis.

[0118] Assessment may be by heteroduplex analysis. In this analysis, the DNA sequence to be tested is amplified, denatured and renatured to itself or to known wild-type DNA. Heteroduplexes between different alleles contain DNA “bubbles” at mismatched basepairs that can affect mobility through a gel. Therefore, the mobility on a gel indicates the presence of sequence alterations.

[0119] Restriction Site Based Methods

[0120] Where an SNP creates or abolishes a restriction site, the assessment may be made using RFLP analysis. In this analysis, the DNA is mixed with the relevant restriction enzyme (i.e. the enzyme whose restriction site is created or abolished). The resultant DNA is resolved by gel electrophoresis to distinguish between DNA samples having the restriction site, which will be cut at that site, and DNA without that restriction site, which will not be cut.

[0121] Where the SNP does not create or abolish a restriction site the SNP may be assessed in the following way. A mutant PCR primer may be designed which introduces a mutation into the amplification product, such that a restriction site is created when one of the polymorphic variants is present but not when another polymorphic variant is present. After PCR amplification using this primer (and another suitable primer or primers), the amplification product is admixed with the relevant restriction enzyme and the resultant DNA analysed by gel electrophoresis to test for digestion.

[0122] Thus if marker-specific restrictions sites do not pre-exist in the isolate to be assessed it may be created by modifying the sequence of cDNA or of the PCR-amplified segment by making appropriate changes in at least one oligonucleotide used for cDNA synthesis or for PCR.

[0123] Antibodies and Antibody Based Methods

[0124] The present invention also provides antibodies specific for the markers disclosed herein, in particular those which are capable of distinguishing the different forms of the marker (e.g. in EHV-1, the D₇₅₂N substitution in the ORF 30 DNA Pol gene). Methods of producing antibodies include immunising a mammal (e.g. human, mouse, rat, rabbit, horse, goat, sheep or monkey) with a polypeptide corresponding to the marker region. Antibodies may be obtained from immunised animals using any of a variety of techniques known in the art, and might be screened, preferably using binding of antibody to antigen of interest. The antibodies can then tested using conventional techniques for their ability to bind the other form of the marker, and those which are selective (capable of distinguishing the two, either through absolute binding or altered affinity) can be selected.

[0125] The use of such antibodies in methods described herein, e.g. for typing or assessing virulence, are also provided by the present invention. For instance, Western blotting techniques or immunoprecipitation may be used (Armitage et al, 1992, Nature 357: 80-82).

[0126] Antibodies may be polyclonal or monoclonal, and may optionally be modified in a number of ways. Indeed the term “antibody” should be construed as covering any specific binding substance having a binding domain with the required specificity. Thus, this term covers antibody fragments, derivatives, functional equivalents and homologues of antibodies, including any polypeptide comprising an immunoglobulin binding domain, whether natural or synthetic. Chimaeric molecules comprising an immunoglobulin binding domain, or equivalent, fused to another polypeptide are therefore included. Cloning and expression of Chimaeric antibodies are described in EP-A-0120694 and EP-A-0125023.

[0127] The invention will now be further described with reference to the following non-limiting Figures, Tables, Sequences and Examples. Other embodiments of the invention will occur to those skilled in the art in the light of these.

[0128] Legends

[0129] FIG. 1. Multi-locus sequence analysis.

[0130] Sequence analysis of a panel of isolates (originating from 63 separate outbreaks) for multiple loci is shown. For each ORF region, the results of sequence analysis are indicated by numbers according to the codes specified in Table 5 below. Each outbreak is coded according to the country of origin (GB=United Kingdom, US=U.S.A., PL=Poland), year of outbreak, identifier for that outbreak for the year and nature of disease, in the form ‘CountryYr/identifier(1,2,3 etc.)/disease(0=attenuated, 1=non-paralytic, 2=paralytic)’. For example, GB83/1/1 and GB83/2/1 indicate two independent outbreaks in the United Kingdom in 1983, without paralytic disease. Dashes (-) indicate the relevant sequence was not determined. * indicates the sequence data is incomplete for the given region, but the available data indicates the given code(s). Within each group, outbreaks have been sub-divided according to disease severity. Specific isolates mentioned in the text correspond to the following outbreaks: AB4-GB80/1/2, V592 - GB85/1/1, Army183 - US41/1/2, RacH-PL68/1/0, Rhinoquin-US72/1/0. RacH and Rhinoquin are vaccine strains that have been attenuated by multiple passage in tissue culture.

[0131] Table 1. Sequence Heterogeneity Between Individual Sequence Templates of V592

[0132] During analysis of the V592 sequence data a number of positions were noted where there were differences between the sequences determined from individual sequence templates, indicating that the V592 virion DNA population was heterogeneous at these positions. Each of the regions is listed (numbered according to the V592 genomic sequence, SEQ. ANNEX 1a) and details of the variation noted. NA indicates that the position lies outside of a recognised protein coding sequence (open reading frame: ORF).

[0133] Table 2. ORF Coding Changes Between V592 and AB4

[0134] V592 ORFs which have an altered amino acid sequence compared to the corresponding AB4 ORF are listed. The position of each change is numbered according to the V592 ORF amino acid sequences (SEQ. ANNEX 1b). For each position, the amino acid sequences for AB4 and V592 are shown. * indicates that the corresponding sequence is absent in the given strain—i.e. the other strain carries additional amino acids, usually due to variation in copy number of a nucleotide repeat element.

[0135] Table 3. Distribution of ORF30-ml Marker (G/A₂₂₅₄) Amongst Isolates From Paralytic or Non-Paralytic Outbreaks.

[0136] Isolates from a total of 59 different outbreaks (23 paralytic, 36 non-paralytic) were analysed to determine the sequence of the ORF30-ml marker (nucleotide position 2254). The table displays the number of occurrences of either G or A at position 2254 for each class of outbreak. The percentage of outbreaks for each class represented by either G or A is shown in italics. Data were analysed via the Fisher exact test to determine the significance of association of A₂₂₅₄ with non-paralytic outbreaks and G₂₂₅₄ with paralytic outbreaks, testing the null hypothesis that each marker is randomly distributed between the different classes of outbreak.

[0137] Table 4. Alignment of EHV-1 ORF30-ml Region With Other Herpesvirus DNA Polymerase Sequences

[0138] Various herpesvirus DNA polymerase sequences were aligned using CLUSTALW (using services at ANGIS, Australia) and the alignment surrounding the EHV-1 ORF30-ml (D/N₇₅₂) position is shown. Gaps are indicated by dashes (—). Viruses have been grouped as alpha-, beta- and gammaherpesviruses, or unclassified. In each case the abbreviated virus name and sequence accession number are shown (apart from EHV-1 strain V592, reported in this study (SEQ. ANNEX 3b)). The first position of each sequence is numbered; where the complete DNA polymerase sequence is not available, numbering of the partial sequence is shown in italics. The position of the D residue conserved in the majority of viruses, corresponding to the ORF30-ml (aa752) marker position, is shaded.

[0139] Table 5. Variable Sequence Marker Codes

[0140] Regions of variable sequence identified during multi locus sequence typing (see FIG. 1) are shown. For each region, the prototype (AB4) nucleotide sequence is shown for the relevant ORF and each of the sequence variants detected listed below in the form of an alignment, with the relevant code for each sequence (as used in FIG. 1) specified. Gaps in the sequence, due to nucleotide deletions compared with one or more of the other sequences, are indicated by dashes (—). For each sequence variant, positions identical to the AB4 sequence are shown by dots (.) and nucleotide differences specified. Sequences have been numbered according to the AB4 nucleotide sequence for each of the ORFs, Blocks of sequence which are non-contiguous are indicated by intervening echelons (\hat{ }). For ORF37, the region of sequence displayed extends beyond the ORF stop codon. Nucleotides after the stop codon are shown in lowercase and are numbered in italics.

[0141] SEQ. ANNEX 1. a) Complete Genomic Sequence of EHV-1 Strain V592; b) Feature Table

[0142] Sequence data was compiled using a combination of random shotgun sequencing and targeted sequencing to fill gaps. Where there was sequence heterogeneity between individual sequencing templates (as listed in Table 1), the majority consensus sequence is shown. The top strand of the sequence is displayed (1a), according to the standard orientation of the genome adopted for EHV-1 strain AB4 [19]. The feature table (1b) was compiled using the Sequin programme (National Center for Biotechnology Information, NIH, U.S.A.) and displays features relating to the recognised open reading frames (ORFs) and nucleotide repeat regions, numbered according to the complete genomic sequence (1a). Features listed are in the orientation of the top strand of the sequence, unless specified as ‘complement’ (bottom strand, reverse direction).

[0143] SEQ. ANNEX 2. PCR Amplification and Sequencing Primers

[0144] Oligonucleotide primers used for amplification and sequencing of selected ORF regions, including regions of sequence variation between AB4 and V592, are shown.

[0145] SEQ. ANNEX 3. a) DNA Sequence of EHV-1 (Strain V592) ORF30; b) Amino Acid Sequence of EHV-1 (Strain V592) ORF30

[0146] For each sequence, residues altered for strain V592 compared with strain AB4 are underlined.

### EXAMPLES

### Example 1

### Determination of the Complete Genomic Sequence of EHV-1 Strain V592

[0147] We determined the V592 genomic sequence (149,430 bp) via shotgun cloning and sequencing of viral DNA prepared from purified virions. Virus supernatant was prepared from equine embryonic lung cells infected at low multiplicity (<0.001 pfu/ml), virions purified by sucrose gradient sedimentation and DNA extracted from purified virions essentially as described by Telford et al [19]. Viral DNA was self ligated, sonicated to generate random fragments and, following end repair, cloned into M13mp19. In addition, a panel of ‘semi-random’ clones was generated by digestion of viral DNA with frequent cutting (blunt ended) restriction enzymes (AluI, PvuII, BalI), followed by cloning into M13mp19. In the final stages of sequencing, specific regions spanning sequence data ‘gaps’ were amplified by PCR, blunt ended and cloned into M13mp19. Single stranded M13 templates were prepared and sequenced using proprietory sequencing reagents, and samples analysed on either an ABI 377 or ABI 9600 automated sequencer. Sequence reads were assembled using the Staden sequence analysis programs PREGAP4 and GAP4 [21]. The complete genomic sequence of EHV-1 strain V592 is shown in SEQ. ANNEX 1. It should be noted that the attached sequence is the consensus for the majority of sequence reads. The V592 stock used to generate DNA for sequencing has not been plaque purified and consequently contains a mixture of DNA populations at certain sites. Sites showing heterogeneity between individual sequencing templates are shown in Table 1. These sites are all regions of variable repeat length apart from one position of single nucleotide heterogeneity.

### Example 2

### Comparison Between the Genomic Sequences of V592 and AB4

[0148] The AB4 complete sequence was included in the V592 sequence assembly to enable positions of variation between the two sequences to be identified using GAP4. Positions of variation were then analysed using the OMIGA software (Oxford Molecular Ltd.) to determine changes resulting in amino acid coding changes for known ORFs. Table 2 shows all of the coding changes identified. A total of 31 out of 76 ORFs were found which possess amino acid variation between the two strains. Two ORFs (24 and 71) showed variable copy numbers of nucleotide repeat elements. Previous studies had indicated variation in repeat element copy number for ORF 24 and ORF71 among EHV-1 field isolates [16, 17]. Such regions are inherently unstable and therefore of limited use for epidemiological studies. ORF 14 of V592 carried a 9 bp duplication, resulting in insertion of 3 amino acids. ORF 68 displayed the most significant change, with a single nucleotide deletion in V592 (8 Gs in AB4, 7Gs in V592) resulting in a frameshift and hence multiple coding changes and premature truncation. Such a frameshift had previously been noted for several other EHV-1 isolates [22]. The other variable ORFs possessed minor changes between AB4 and V592, usually comprising a single amino acid substitution.

### Example 3

### Evaluation of Genetic Heterogeneity of EHV-1 Field Isolates

[0149] As noted above, EHV-1 infection results in outbreaks of varying severity, including neurological (paralytic) disease, induction of abortion or mild respiratory symptoms. Previous evidence had indicated genetic variability of EHV-1 field isolates but had not demonstrated conclusively the presence of distinct ‘strains’ of EHV-1. Having identified genetic differences between a ‘paralytic’ (AB4 and non-paralytic (V592) strain of EHV-1, we sought to test the following hypotheses:
[0150] 1) Positions of sequence variation between AB4 and V592 are indicative of regions of sequence variability amongst EHV-1 field isolates and will therefore provide markers enabling discrimination between EHV-1 strains.
[0151] 2) AB4 is representative of a distinct group of EHV-1 strains capable of causing paralytic disease.
[0152] 3) One or more specific sequence ‘markers’ which vary between AB4 and V592 are indicative of strains capable of causing paralytic disease.

[0153] In order to test the above hypotheses, we assembled DNA samples prepared from a panel of field isolates (from the U.K. and North America) recovered from outbreaks of varying disease severity, collected over the course of 30 years. A subset of the ORFs with observed coding changes were selected for preliminary analysis, namely ORFs 8, 11, 14, 15, 30, 33, 34, 37, 39, 40, 52, 67, 68, 73. For each of these ORFs, PCR primers were designed for amplification of regions of sequence variability and for sequencing, as listed in SEQ. ANNEX 2. PCR products were purified and sequenced (ABI 9600) and the results assembled using the DNASTAR software package. For each ORF region analysed, positions of variable sequence were noted as listed in Table 5.

### Example 4

### Multi-Locus Sequence Typing Discriminates Between EHV-1 Strains Circulating in the Field

[0154] The results obtained from multi-locus sequence typing of the panel of field isolates provide support for Hypothesis 1, namely that the loci of variable sequence noted in the comparison of the AB4 and V592 genomes are suitable as markers for discriminating between strains of EHV-1 circulating in the field. In particular, the ORF68 region sequencing results are particularly useful, since this locus displays an unusually high frequency of variable nucleotides and grouping of isolates according to their ORF68 sequences correlates well with other variable loci tested, as summarised in

[0155] FIG. 1. Where multiple isolates from a given outbreak have been characterised, they have provided consistent results for the markers tested. Significantly, it appears that six major distinct groups of related strains are identifiable (on the basis of ORF68 sequences and supported by other markers tested), isolated from outbreaks that have occurred over the course of 20-30 years. The characteristics of these groups are summarized below:
[0156] Group 1 Includes AB4 (from outbreak GB80/1/2) and isolated from an additional four U.K. outbreaks, occurring between 1980 and 1993. Three outbreaks of abortion without paralysis, one of paralysis and abortion. An isolate from a single U.S.A. outbreak (abortion without paralysis, 1985) is also placed in this group, since it carries an ORF6B which is frameshifted compared to the predominant form (although this has 9 rather than 8 Gs at the ORF68 frameshift position and is therefore distinct from other members of group 1).
[0157] Group 2 Isolates from eleven U.S.A. outbreaks and six U.K. outbreaks, occurring between 1970-2003. Nine outbreaks of abortion without paralysis, eight of paralysis (with or without abortion). This group is closely related to Group 1 (but with 7 rather than 8 Gs at the ORF68 frameshift position).
[0158] Group 3 Isolates from seventeen U.K. and one U.S.A outbreaks, occurring between 1981-2003. One respiratory only, fourteen outbreaks of abortion without paralysis, three of paralysis (with or without abortion).
[0159] Group 4 solates from five U.K. and one U.S. outbreaks, occurring between 1980-2000. One respiratory only, two outbreaks of abortion without paralysis and three of paralysis (with or without abortion).
[0160] Group 5 Isolates from nine U.S.A. outbreaks, occurring between 1975 -2002. Two of abortion without paralysis and seven of paralysis (with or without abortion). This group also contains Army 183 (US41/1/1/2: an experimental strain originally isolated in the U.S.A. which causes abortion and paralysis), RacH (PL68/1/0: a tissue culture passaged, attenuated vaccine strain originally isolated in Poland), and Rhinoquin (US72/1/0: a tissue culture passaged, attenuated vaccine strain originally isolated in the U.S.A.)
[0161] Group 6 Includes V592 (GB85/1/1) and isolates from three other U.K. outbreaks, occurring between 1985-2001. One respiratory outbreak, three of abortion without paralysis.

[0162] The above group assignments were made on the basis of the ORF68 marker. These assignments are supported by the following general rules applying to other markers (although it should be noted that not all of the markers have been determined for all of the isolates within each group).

[0163] ORF14 Majority of isolates with type 2A sequence in groups 3 and 4 ORF33 Majority of isolates with type 1 sequence (both 33-ml and 33-m2) in groups 1 and 2 ORF37 Type 1A sequence predominantly in groups 1 and 2 ORF39 Majority of isolates with type 2 sequence in groups 3, 4 or 5 ORF52 Type 1 sequence predominantly in groups 1 and 2

[0164] From consideration of the above, Groups 1 and 2 are related to each other and similarly Groups 3 and 4 are related. Group 6 possesses characteristic unusual sequence for ORFs 8, 11, 30-m2, 34, 39, 40, 67 and 73.

[0165] The observation of genetically related strains being recovered from outbreaks separated by many years support the proposal that distinct strains of EHV-1 circulate in the field and that such strains are relatively genetically stable over time. Furthermore, there is evidence for geographical restriction in strain circulation, with certain of the groups consisting of predominantly U.K. (Groups 1, 3, 4 and 6) or U.S.A. (Group 5) isolates.

### Example 5

### Distinct Strain Groups of EHV-1 Do Not Appear to be Associated With Outbreaks of Severe (Paralytic) Disease

[0166] The data disprove Hypothesis 2, since it is clear that isolates genetically distinct from AB4 have been recovered from outbreaks of paralytic disease. Furthermore, the isolate groupings as described above do not appear to segregate clearly according to outbreak severity, since isolates from paralytic outbreaks are found in five of the six groups. Group 6 does not contain any isolates from paralytic outbreaks and may represent isolates with reduced neurovirulence, but more data are required to test this possibility (currently only four outbreaks are represented in Group 6). Similarly, the majority (15/18) of isolates in Group 3 are from non-paralytic outbreaks, suggesting that members of this group may have reduced neurovirulence. Conversely, the majority of isolates in Group 5 (8/10) are from paralytic outbreaks. However, consideration of ORF30 sequence variation (see Example 6 below) suggests strongly that this particular marker, rather than the strain grouping, correlates with disease severity.

### Example 6

### Sequence Variation in ORF30 (DNA Polymerase) Correlates Strongly With Disease Severity

[0167] As mentioned above, most of the markers tested show good correlation with the strain groupings identified according to the ORF68 sequences.

[0168] Notably, this is not the case for one of the variable sequences within ORF30. The complete nucleotide and amino acid sequence of EHV-1 strain V592 ORF30 is shown in SEQ. ANNEX 3. Three nucleotide changes are present compared with the AB4 ORF30 sequence (accession no. AAB02465), namely C₉₂₄-T (non-coding change), G₂₂₅₄-A (amino acid change D₇₅₂-N) and G₂₉₆₈-A (amino acid change Eggo-K)

[0169] Of these three positions, the G/A₂₂₅₄ polymorphism was found to show a very strong correlation with isolates from outbreaks of paralytic disease, with the majority of ‘paralytic’ isolates (83%) having G₂₂₅₄ whereas 100% of the non-paralytic isolates had A₂₂₅₄ (Table 3. This includes data from all the outbreaks listed in FIG. 1, with the exception of the attenuated vaccine strains RacH (PL68/1/0) and Rhinoquin (US72/1/0)). This association was highly significant (p<0.0001). It should also be noted that three of the four ‘paralytic’ isolates with A₂₂₅₄ were from single cases of paralytic disease, rather than multi-case outbreaks.

[0170] In addition to the isolates from field outbreaks, two tissue culture adapted attenuated vaccine strains of EHV-1 were analysed. Both of these vaccine strains were found to carry the G₂₂₅₄ paralytic' marker. Isolate T501 (designated as US72/1/0) is a prototype, attenuated vaccine strain (‘Rhinoquin’) which had been developed and tested in the U.S.A. [23]. Although found to be attenuated in preliminary laboratory studies, this virus was associated with abortions and paralytic disease when studied (as a live vaccine) in large scale field trials; as a consequence, development of the Rhinoquin vaccine ceased [24]. The second attenuated vaccine strain (RacH, designated PL68/1/0 (25]) , in contrast to Rhinoquin, has a good safety record. It may be significant, therefore, that RacH carries a second variant nucleotide close to G₂₂₅₄, namely C₂₂₅₈. This sequence is not present in any other of the isolates tested, and results in a coding change Y₇₅₃-S.

[0171] A second single nucleotide polymorphism, A₂₂₇₉-G (marker ORF30-ml; code 2B) was noted which was present in two paralytic isolates which had A₂₂₅₄ rather than G₂₂₅₄ for ORF30. One of these isolates (T937, outbreak US99/3/2) is from a single case of paralytic disease, while the other (T949, outbreak US02/1/2) is from a multi-case outbreak of paralytic disease. Accordingly, this infrequent ORF30 sequence variant may also predispose to paralytic disease.

[0172] Interestingly, another ORF30 coding change variant (marker ORF30-m2: G/A₂₉₆₈) did not correlate with disease severity. Of the isolates tested, the majority had G₂₉₆₈, including representatives from paralytic and non-paralytic outbreaks. All of the isolates with A₂₉₆₈ were within Group 6, i.e. V592 related (see FIG. 1).

### Example 7

### Comparison Between EHV-1 ORF30 Sequence Variation and Other Herpesviruses

[0173] The observed sequence variation for EHV-1 at ORF30 amino acid position 752 occurs at a conserved position of the herpesvirus DNA polymerase. An alignment of the selected region for certain alpha, beta, gamma and unclassified herpesviruses is shown in Table 4. The sequence of strain AB4 (D₇₅₂) conforms to all of the herpesviruses DNA pol sequences shown in Table 4, with the exception of PRV, which has a conserved amino acid substitution (E) at this position. The sequence observed for V592 and the majority of EHV-1 field isolates (N₇₅₂) is therefore not conserved with the vast majority of other herpesviruses, including those of mammals, birds, reptiles, amphibians and fish.

[0174] This raises the interesting possibility that the progenitor EHV-1 virus is likely to have encoded D at position 752 of DNA pol. Subsequently, mutation at this position to N₇₅₂ may have occurred and the resulting strains may have had a selective advantage (eg. due to more efficient establishment of latency/reactivation or improved transmission, possibly via reduced virulence and hence increased carriage long-term within horse populations) and hence now predominate. If so, the D₇₅₂ marker characteristic of paralytic strains results from back-mutation to the progenitor sequence. The adjacent residue (753) is also conserved as tyrosine or other hydrophobic residues. It may be significant, therefore, that RacH (which carries the D₇₅₂ marker but has a good safety record in the field) has a non-conservative mutation at this position (S₇₅₃), which may have possibly prevented recombination around this region with naturally occurring isolates resulting in generation of viruses with paralytic potential.

[0175] As described in Example 6, two paralytic isolates were identified which are unusual in encoding N (rather than D) at position 752, and which carry a novel nucleotide substitution (A₂₂₇₉-G) resulting in an amino acid change from D-G at position 760. It is interesting to note from the alignment (Table 4) that the consensus amino acid at the equivalent position for alphaherpesviruses is G, with only EHV-1 (AB4 and V592) and EHV-4 ORF30 found to encode D at this position. Thus, the D₇₆₀-G variation is analogous to the N₇₅₂-D variation, i.e. a change resulting in the amino acid conforming to the consensus at this position (for at least the alphaherpesviruses) is found in paralytic EHV-1 isolates. Thus the D₇₆₀-G amino acid change may represent an atypical EHV-1 ORF30 mutation which results in a virus with increased potential for paralytic disease.

[0176] Material and Methods

[0177] Reagents

[0178] PCR reagents were obtained from Applied Biosystems International (USA), Genset (France) and Invitrogen (USA). Restriction enzymes were obtained from Applied Biosystems (USA) and Promega (USA). An Amicon Microcon Filter YM100 kit (Millipore, USA) was used to purify PCR products and DNA quantitation standards were obtained from Whatman Bioscience (UK). Sequencing reagents were obtained from Applied Biosystems International (USA) and Web Scientific (UK).

[0179] Viruses and Cells

[0180] Virus field isolates were obtained from the archive material held at the Animal Health Trust and Gluck Equine Research Institute. Where necessary, virus isolates were propagated in equine derived cell lines (fibroblast) and infected cells used for the preparation of viral DNA.

[0181] Preparation of Viral DNA

[0182] i) Large Scale, Virion DNA (Strain V592) and ‘Shotgun’ Cloning

[0183] DNA was prepared from purified virions essentially as described by Dumas et al 1980, Telford et al, 1992 and Rawlinson et al 1996. Equine fibroblasts (embryonic lung cells) were infected at low multiplicity and incubated at 37° C. until complete cytopathic effect (c.p.e.) had developed. The tissue culture medium was harvested, centrifuged at low speed (1500g, 5 mins) to remove cell debris and the supernatant centrifuged at high speed (17,000g, 200 mins) to pellet virions. Pellets resuspended in 5ml MEM/2%FCS and then purified via a sucrose gradient (40%/60% sucrose in PBS), with high speed centrifugation (69,000 g, 120 mins). Following collection of the virion material present at the sucrose gradient interface, the virus was pelleted by centrifugation (17,000 g, 180 mins) and the pellet resupended in 1 ml TE buffer (10 mM Tris, 0.1 mM EDTA, pH 8). Virion DNA was prepared by Proteinase K/SDS digestion followed by phenol/chloroform extraction and ethanol precipitation. The DNA (re-dissolved in TE buffer) was self ligated (T4 DNA ligase) to remove free ends and then sonicated using a cup horn device (Ultrasonic processor XL, MISONIX, U.S.A.) to generate randomly sheared fragments. Sonicated DNA was then gel purified (QIAEX kit, QIAGEN Ltd, U.K.), selecting fragments with an approximate size range of 300-1,000 bp. Fragments were cloned into either M13mp18 or M13mp19 via blunt end cloning, using the Novagen ‘Perfectly Blunt’ kit (CN Biosciences (UK) Ltd., U.K.). Additional blunt ended fragments were generated by restriction enzyme digestion using frequently cutting enzymes.
[0184] ii) Small scale, virus isolate DNA (various field isolates) Equine fibroblasts were infected (various multiplicities, depending on the isolate) and incubated (37° C.) until 50-100% c.p.e. had developed. Cells were then pelleted by centrifugation, washed with TE buffer and resuspended in Proteinase K/SDS solution 0.1 mg/ml Proteinase K, 0.5% SDS). Following 1-2 hours digestion, the DNA was prepared by phenol/chloroform extraction followed by ethanol precipitation. The purified DNA was re-dissolved in TE buffer.
   Preparation of Single Stranded M13 Sequencing Templates

[0186] Following ligation of randomly sonicated fragments or blunt ended restriction enzyme products derived from V592 virion DNA, ligation reactions were transformed into E. coli and plated onto agar (supplemented with X-gal) for selection of white plaques (according to manufactures instructions: Novagen ‘Perfectly Blunt’ kit). Individual plaques were picked into TE buffer before being used to infect E. coli cultures to prepare sequencing templates, in accordance with methods given in the ‘ABI Prism DNA Sequencing Guide’ (Applied Biosystems, USA).

[0187] PCR Amplification and Purification.

[0188] The PCR mix (50 μl) consisted of 0.3 μM of each primer (Genset), 0.2 mM of each NTP (Applied Biosystems), 3×PCRx Enhancer solution (Invitrogen) and 1.25 U/μl AmpliTaq DNA polymerase (Applied Biosystems) in 10 mM Tris-HCL (pH 8.3) solution containing 1.5 mM MgCL₂ (Applied Biosystems). The PCR reaction was denatured for 4 min at 94° C., then cycled for 32 cycles at 94° C. for 30 seconds, 1 min at the annealing temperature of the primers used, and 2 min at 72° C. followed by a final step of 10 min at 72° C. After cycling, 10 μl of each PCR product was size fractionated on a 0.7% agarose gel containing ethidium bromide. Following product identification, the PCR products were purified using an Amicon Microcon Filter YM100 kit and quantified by size fractionation, on a 2% agarose gel containing ethidium bromide, with DNA Quantification standards (Whatman Bioscience). The purified PCR products were either cloned into M13mp19 (gap filling for determination of V592 sequence) or directly sequenced using EHV-1 specific sequencing primers (SEQ. ANNEX 2).

[0189] Sequencing Reactions and Sequence Analysis

[0190] Templates (M13 or PCR products) were sequenced using ABI sequencing reagents (dRhodamine or Big Dye) according to manufacturer's instructions. Reaction products were analysed using either an ABI 377 or ABI 3600 automated sequencer. Trace files were downloaded and processed for assembly and analysis using either:
[0191] a) the Staden suite of programmes [21], in particular PREGAP4 and GAP4, run using either a LINUX or Windows NT platform. Further details of the Staden programmes may be found at: ‘www.mrc-lmb.cam.ac.uk/pubseq/2 .
[0192] b) the DNASTAR programme SeqManII (version 4.03, DNASTAR, Inc., U.S.A.))

[0193] Following sequence assembly, further analysis, in particular identification of coding changes and comparison between homologous genes between different herpesviruses, was carried out using the OMIGA software package (version 2.0, Oxford Molecular Ltd., U.K.)

[0194] References

[0195] 1. Blunden, A. S., Whitwell, K. E. & Pegler, K. M. (1993). An outbreak of paralysis associated with equine herpes virus type 1 infection in a livery stable. Progress in Veterinary Neurology 3:95-100.
[0196] 2. Crowhurst, F. A., Dickinson, G. & Burrows, R. (1981). An outbreak of paresis in mares and geldings associated with equid herpesvirus 1. The Veterinary Record 109:527-528.
[0197] 3. Greenwood, R. E. S. & Simson, A. R. B. (1980). Clinical report of a paralytic syndrome affecting stallions, mares and foals on a thoroughbred studfarm. Equine Veterinary Journal B12B:113-117.
[0198] 4. McCartan, C. G., Russell, M. M., Wood, J. L. N. & Mumford, J. A. (1995). Clinical, serological and virological characteristics of an outbreak of paresis and neonatal foal disease to equine herpesvirus-1 on a stud farm. The Veterinary Record 136: 7-12.
[0199] 5. Mumford, J. A. & Edington, N. (1980). EHV-1 and equine paresis. The Veterinary Record 106:277.
[0200] 6. Allen, G. P., Kydd, J. H., Slater, J. D. and Smith, K. C. (1999). Recent advances in understanding the pathogenesis, epidemiology and immunological control of equid herpesvirus-1 (EHV-1) abortion. In: Equine Infectious Diseases VIII (eds. U Wernery, J. F. Wade, J. A. Mumford and O-R Kaaden) R&W Publications (Newmarket) Limited. pp129-146.
[0201] 7. Edington, N., Bridges, C. G. & Patel, J. R. (1986). Endothelial cell infection and thrombosis in paralysis caused by equid herpesvirus-1: equine stroke. Arch. Virol. 90:111-124.
[0202] 8. Mumford, J. A., Hannant, D., Jessett, D. M., O'Neill, T., et al. (1994). Abortigenic & neurological disease caused by experimental infection with Equid herpesvirus-1. Equine Infectious Diseases VII (Proceedings), 261-275
[0203] 9. Platt, H., Singh, H. and Whitwell, K. E. (1980). Pathological observations on an outbreak of paralysis in broodmares. Equine Veterinary Journal 12: 118-126.
[0204] 10. Whitwell, K. E. & Blunden, A. S. (1992). Pathological findings in horses dying during an outbreak of the paralytic form of Equid herpesvirus type 1 (EHV-1) infection. Equine Veterinary Journal 24: 13-19.
[0205] 11. Patel J R, Edington N, Mumford J. A. (1982). Variation in cellular tropism between isolates of equine herpesvirus-1 in foals. Arch. Viol. 74: 41-52.
[0206] 12. Mumford, J A, Rossdale, P D, Jesset, D M, Gann, S., Ousey, J. and Cook, R F (1987). Serological and virological investigations of an equid herpesvirus-1 (EHV-1) abortion storm on a stud farm in 1985. Journal of reproduction and Fertility 35 (Suppl.): 509-518.
[0207] 13. Smith, K. C., Whitwell, K. E., Mumford, J. A., Hannant, D., Blunden, A. S., and Tearle, J. P. (2000). Virulence of the V592 isolate of equid herpesvirus type 1 in ponies. J. Comp. Path. 122:288-297.
[0208] 14. Allen, G. P., Yeargan, M. R., Turtinen, L. W., Bryans, J. T. and McCollum, W. H. (1983). Molecular epizooitologic studies of equine herpesvirus-1 infections by restriction endonuclease fingerprinting of viral DNA. Am. J. Vet. Res. 44, 263-271.
[0209] 15. Allen, G. P., Yeargan, M. R., Turtinen, L. W. and Bryans, J. T. (1985). A new field isolate of equine abortion virus (equine herpesvirus-1 among Kentucky horses. Am. J. Vet. Res. 46:138-140
[0210] 16. Binns, M., McCann, S., Zhang, L., Wood, J. & Mumford, J. A. (1994). Molecular epidemiology of EHV-1 and EHV-4: a search for variable restriction sites. Equine Infectious Diseases VII (Proceedings), 237-241.
[0211] 17. McCann, S. H. E., Mumford, J. A. & Binns, M. M. (1995). Development of PCR assays to detect genetic variation amongst equine herpesvirus-1 isolates as an aid to epidemiological investigation. Journal of Virological Methods 52: 183-194.
[0212] 18. Studdert, M. J, Crabb, B. S. and Ficorilli, N. (1992). The molecular epidemiology of equine herpesvirus 1 (equine abortion virus) in Australasia 1975-1989. Australian Veterinary Journal 69:104-111.
[0213] 19. Telford, E. A. R., Watson, M. S., McBride, K. & Davison, A. J. (1992). The DNA sequence of equine herpesvirus-1. Virology 189:304-316.
[0214] 20. Telford, E. A. R., Watson, M. S., Perry, J, Cullinane, A. A. and Davison, A. J. (1998). DNA sequence of equine herpesvirus-4. J Gen Virol 79: 1197-1203.
[0215] 21. Staden, R. (1996). The Staden Sequence Analysis Package. Molecular Biotechnology 5: 233-241.
[0216] 22. Meindl, A., Osterrieder, N. (1999). The equine herpes 1 Us2 homolog encodes a non-essential membrane-associated virion component. J. Virol 73:3430-3437.
[0217] 23. Purdy C W, Ford S. J. and Grant W. F. (1977). Equine rhinopneumonitis virus (herpesvirus type 1): attenuation in stable monkey cell line. Am J Vet Res. 38:1211-1215.
[0218] 24. Kit M and Kit S. U.S. Pat. No. 05,292,653.
[0219] 25. Meyer H, Hubert P H, Eichhorn W. (1987) Changes in restriction enzyme pattern of the equine herpes virus type 1 (EHV-1) strain Rac H DNA during attenuation. J. Vet. Med[B]. 34:310-3.
[0220] 26. Wilson (1997). Equine herpesvirus 1 myeloencephalopathy. Vet Clin North Am Equine Pract. 13: 53-72
[0221] 27. Wang, T. S.-F. (1991). Eukaryotic DNA polymerases. Ann. Rev. Biochem. 60:513-552.
[0222] 28. Hwang, C. B., Ruffner, K. L. and Coen, D. M. (1992). A point mutation within a distinct conserved region of the herpes simplex virus DNA polymerase gene confers drug resistance. J. Virol. 66:1774-1776.
[0223] 29. Chou, S., Lurain, N., Weinberg, A., Cai, G-Y, Sharma, P., Crumpacker, C. S., Adult AIDS Clinical Trials Group CMV Laboratories. (1999). Antimicrob. Agents and Chemother. 43: 1500-1502.
[0224] 30. Matthews, J. T., Terry, B. J. and Field, K. A. (1993). The structure and function of the HSV DNA replication proteins: defining novel antiviral targets. Antiviral; Res. 20: 89-114.

[0225] 31. Kamiyama, T., Kurokawa, M. and Shiraki, K. (2001). Characterisation of the DNA polymerase gene of varicella-zoster viruses resistant to acyclovir. J. Gen. Virol. 82: 2761-2765.

TABLE 1
Sequence heterogeneity between individual sequence
templates of V592

| Position¹ | ORF | Variation |
|---|---|---|
| 105-308 | NA | 10-13 copies 17 bp repeat element |
| 366-707 | NA | 14-19 copies 18 bp repeat element |
| 1959 | 2 | substitution A-G in minority of reads (2/9) |
| 73803-74090 | NA | 8-9 copies 32 bp repeat element |
| 108895-108984 | NA | 4-5 copies 18 bp repeat element |
| 112316-112419 | NA | 8-9 copies 13 bp repeat element |
| 123549-123656 | NA | 2-4 copies 27 bp repeat element |
| (138661-138768) | | |
| 129328-129552 | 71 | 17-18 copies 15 bp repeat element |

¹Numbered according to V592 genome

[0226] TABLE 2
ORF coding changes between V592 and AB4

| ORF | Position¹ | AB4 sequence | V592 sequence |
|---|---|---|---|
| 2 | 59 | G | D |
| 5 | 114 | G | V |
| 8 | 114 | D | N |
| 11 | 189 | Q | K |
| 13 | 305 | S | L |
| | 460 | A | T |
| 14 | 619-621 | * | PSR |
| | | | 9 bp duplication resulting in 3 amino acid insertion |
| 15 | 166 | D | N |
| 22 | 430 | S | P |
| 24 | 2567-2568 | (PTLPPAPPLPQSTSKAASGPP)₂ | * |
| | | | 126 bp deletion (2 copies 63 bp repeat element) |
| | | | resulting in 42 amino acid deletion |
| | 2586 | G | S |
| | 2829-2836 | * | AKDQAKDQ |
| | | | 24 bp insertion (2 copies 12 bp repeat element) |
| | | | resulting in 8 amino acid insertion |
| | 2904 | E | K |
| | 2913-2927 | * | PTGAVPENTPLPDDS |
| | | | 45 bp insertion resulting in 15 amino acid insertion |
| | 3099 | T | A |
| 29 | 12 | T | K |
| 30 | 752 | D | N |
| | 990 | E | K |
| 31 | 90 | N | S |
| 32 | 42 | S | L |
| 33 | 15 | N | H |
| | 976 | N | D |
| 34 | 66 | D | G |
| 36 | 47 | S | R |
| 37 | 265 | A | V |
| 39 | 440 | S | L |
| 40 | 196 | R | H |
| 42 | 1275 | K | R |
| 45 | 427 | E | G |
| 46 | 140 | F | S |
| 50 | 367 | P | S |
| 52 | 386 | A | V |
| 57 | 804 | K | R |
| 64 | 73 | T | A |
| | 648 | T | S |
| 67 | 261 | S | F |
| 68 | 210 | R | H |
| | 247 | D | M - due to single nucleotide (C) deletion resulting |
| | | | in frameshift relative to AB4. All downstream |
| | | | sequence divergent from AB4. Resulting polypeptide |
| | | | 303 amino acids long (cf. 418 for AB4) |
| 71 | 226-227 | SS | TA |
| | 231-299 | * | TAATTTAATTSSATTAATTSS(TTTAA)₉TTT |
| | | | additional copies 15 bp repeat elements and |
| | | | nucleotide substitutions, resulting in 69 amino |
| | | | acid insertion². |
| 73 | 122 | A | V |
| 76 | 128 | F | S |

¹Numbered according to the V592 amino acid sequence.
²Variable copy number in V592 - majority sequence shown

[0227] TABLE 3
Distribution of ORF 30-ml marker amongst outbreaks of
paralytic or non-paralytic disease in the U.K. and U.S.A.

| Type of outbreak | G₂₂₅₄ | A₂₂₅₄ | Total |
|---|---|---|---|
| Non-paralytic | 0 | 36 | 36 |
| Percentage | 0% | 100% | |
| Paralytic | 19 | 4 | 23 |
| Percentage | 83% | 17% | |
| Total | 19 | 40 | 59 |

Significance of association: p < 0.0001 (Fisher exact test)

[0228] [image] TABLE 5
Variable Sequence Marker Codes

ORF8
CODE 331
1 CGTCTCTCGG
2 .........A
ORF11
CODE 560
1 AGAGTCAGTG
2 .....A....
ORF14
CODE 1841 1851 1861 1871 1881 1891 1901
1 TGCGCCCCAG C---------CGTGCCGGG CGTTCCCGCG TGAGAGTGGA AGACCAAACT CTGGAACCAT CGTCCCCCGC
1A .......... .---------......... .......... ...A...... .......... .......... ..........
1B .......... .---------......... .......... ...C...... .......... .......... ..........
2 .......... .CGCCCCAGC......... .......... .......... .......... .......... ..........
2A .......... .CGCCCCAGC......... .......... ...A...... .......... .......... ..........
2B .......... .CGCCCCAGC......... .......... .......... .......... .......... ........A.
3 .......-.. .CGCCCCAGC......... .......... .......... .......... .......... ..........
ORF15 490
1 AACCTCGATG
2 ......A...
ORF30-m1
CODE 2251 2261 2271 2281 2291 2301
1 GTCGACTACT CGACGTTCGA GGTGGGTGAC CAAAAGTTAT TTTTTGTCCA CGCCCATATT
1A .......C.. .......... .......... .......... .......... ..........
2 ...A...... .......... .......... .......... .......... ..........
2A ...A...... .......... .......... .......... .......... ....A.....
2B ...A...... .......... ........G. .......... .......... ..........
ORF30-m2
CODE 2961
1 GGCAGCAGAG
2 .......A..
ORF33-m1
CODE 41
1 GCAATTGGCG
2 ..C.......
ORF33-m2
CODE 2921
1 TGGAAAATGA
2 .....G....
ORF34
CODE 151 \hat{ } 191 \hat{ } 301
1 CAACAGACAA \hat{ } CGGACGATCT \hat{ } GCCTGCCGGG
2 .....T.... \hat{ } .......... \hat{ } ..........
2A .....T.... \hat{ } .......... \hat{ } ..A.......
2B .....T.... \hat{ } .......... \hat{ } ......T...
3 .......... \hat{ } ......G... \hat{ } ..........
0RF37
CODE 791 801 811 821 831 841 851
1 GGGCGGCGTC CCTTTTTTCC CCAAAATAAa agccggtgca attaaagacg agtgcccctt tttt-gtcggc
1A .......... .......... .......... .......... .......... .......... ....t......
2 ...T...... .......... .......... .......... .......... .......... ....-......
ORF39
CODE 1311 \hat{ } 1561
1 AATAGTGTCA \hat{ } CCCGAGCCAG
2 .......... \hat{ } ........C.
3 ........T. \hat{ } ........C.
ORF40
CODE 491 \hat{ } 581
1 TCTACACCCC \hat{ } TTGATCGTAT
2 .......T.. \hat{ } ......A...
ORF52
CODE 1151
1 GATACGCCAA
2 .......T...
ORF67
CODE 751 781
1 GCCAGGCAGC \hat{ } TCTGCAGAAA
1A ........A. \hat{ } .T........
2 .......... \hat{ } .T........
ORF68
CODE 331 341 \hat{ } 621 / 701 711 721 731 741 751
1 CATCTCAACT CCAGCCTTAT \hat{ } ATTAGTTCGT \hat{ } GGCGGCCGCT GCCGCGGCGG CGGCCGTCGG AGGGGGGGG-A TGCGCGCCCC
GAGGCGGCGC
1A .......... .......... \hat{ } .......... \hat{ } .......... .......... .......... .........G. ..........
..........
2 .......... .......... \hat{ } .......... \hat{ } .......... .......... .......... ........-.. ..........
2A .......... .......... \hat{ } .......... \hat{ } .........C .......... .......... ........-.. ..........
..........
3 .......... .......... \hat{ } ........A. \hat{ } .......... ........T. .......... ........-.. ..........
..........
3A .......... .......... \hat{ } ........A. \hat{ } .........A ........T. .......... ........-.. ..........
..........
4 .......... .......... \hat{ } ........A. \hat{ } .......... .......... .......... ........-.. ..........
..........
4A .......... ...A...... \hat{ } ........A. \hat{ } .......... .......... .......... .......-.. ..........
..........
4B .......... .......... \hat{ } ........A. \hat{ } .......... .......... .......... .......-.. ..........
....T.....
5 .......... .......... \hat{ } ........A. \hat{ } .........G ..A....... .......... .......-.. ..........
..........
6 .....T.... .......... \hat{ } ........A. \hat{ } .......... .......... .......... .......-.. ..........
....T.....
ORF73
CODE 360
1 CAATGCCTCT
2 .....T....

1. A method for sub-typing, classifying, identifying or monitoring an Equine herpesvirus type 1 (EHV-1) isolate, the method comprising use of a genetic marker shown in Table 5.

2. A method as claimed in claim 1 for sub-typing the EHV-1 isolate into one of the 6 groups shown in FIG. 1.

3. A method as claimed in claim 2 wherein the marker is an ORF68 polymorphic sequence shown in Table 5.

4. A method for assessing the virulence of an Equine herpesvirus type 1 (EHV-1) or type 4 (EHV-4) isolate, the method comprising use of a genetic marker.

5. A method as claimed in claim 4 wherein the marker is a DNA polymerase (ORF30) marker.

6. A method for assessing the virulence of a herpesvirus isolate, the method comprising use of virulence marker corresponding to an DNA polymerase ORF30-ml region virulence marker.

7. A method as claimed in claim 6 wherein the herpesvirus isolate is an Equine herpesvirus type 1 (EHV-1) or type 4 (EHV-4) isolate.

8. A method as claimed in claim 6 wherein the marker is a polymorphic marker.

9. A method as claimed in claim 6 which is used to assess neurovirulence.

10. A method as claimed in claim 6 wherein a marker corresponding to ORF30 amino acid position 752 and\or 760 of the EHV-1 V592 is assessed.

11. A method as claimed in claim 10 wherein the presence of an acidic amino acid at the position corresponding to 752 and\or a non-acidic amino acid at the position corresponding to 760 is correlated with higher virulence of the herpesvirus.

12. A method as claimed in claim 11 wherein the acidic amino acid is Asp and non-acidic amino acid is Gly.

13. A method as claimed in claim 12 wherein the nucleotide sequence of the codon encoding the amino acid is be assessed

14. A method as claimed in claim 13 wherein the nucleotide position corresponding to ORF30 2254 and\or 2279 of the EHV-1 V592 is assessed.

15. A method as claimed in claim 14 wherein the presence of a ‘G’ at position 2254 and\or 2279 is correlated with higher virulence of the herpesvirus.

16. A method as claimed in claim 15 wherein the presence of a ‘G’ at position 2254 is correlated with higher virulence.

17. A method as claimed in claim 6 which comprises the steps of:
(i) providing a sample of nucleic acid from the herpesvirus isolate, and,
(ii) establishing the presence or identity of the marker in the nucleic acid sample.

18. A method as claimed in claim 17 wherein the isolate is harboured as a latent virus within host cells, wherein said host cells are lysed to release nucleic acid molecules.

19. A method as claimed in claim 17 which comprises the step of amplifying a portion of the sample of nucleic acid containing the marker prior to determining the presence or absence of the marker variant.

20. A method as claimed in claim 19, which method comprises the steps of:
(i) providing a sample of nucleic acid from the herpesvirus isolate, and,
(b) contacting the nucleic acid molecules with oligonucleotide primers under suitable conditions permitting hybridization of the oligonucleotides to the nucleic acid molecules;
wherein a first oligonucleotide selectively binds the nucleic acid on the 3′ side of the marker, and a second oligonucleotide binds to nucleic acid on the 5′ side of the marker,
(c) enzymatically amplifying a specific region of the nucleic acid molecules comprising the marker sequence using said oligonucleotides as primers;
(d) determining whether the identity of the marker variant in the amplified sequences.

21. A method as claimed in claim 20 wherein at least one primer is a mutant oligonucleotide primer which introduces a mutation into the amplification product, such that a restriction site is created when one of the marker variants is present but not when another marker variant is present.

22. A method as claimed in claim 17 which comprises determining the binding of an oligonucleotide probe to the nucleic acid sample or amplification product therefrom, which probe comprises a nucleic acid sequence which binds specifically to one marker variant and does not bind specifically to other marker variant.

23. A method as claimed in claim 17 wherein the presence or identity of the marker variant in the nucleic acid sample is established by single strand conformation polymorphism analysis (SSCP); heteroduplex analysis; or RFLP analysis.

24. A method as claimed in claim 17 wherein the marker variant is confirmed by nucleotide sequencing.

25. A pair of oligonucleotide primers for use in probing or amplification of nucleotide positions 2254 and\or 2279 of the EHV-1 or EHV-4 ORF30-ml region, said primers being between about 18 and 30 nucleotides in length, which pair consists of a first oligonucleotide which selectively binds to nucleic acid on the 3′ side of the region and a second oligonucleotide which selectively binds to the 5′ side of the region such as to be capable of amplifying a region of between 30 to 600 nucleotides

26. A pair of oligonucleotide primers as claimed in claim 25 which amplify at least the entire ORF30-ml region.

27. A pair of oligonucleotide primers for use in probing or amplification of a region comprising any two or more of nucleotide positions 336, 344, 629, 710, 713, 719, 731-740, 755 of EHV-1 ORF68, said primers being between about 18 and 30 nucleotides in length, which pair consists of a first oligonucleotide which selectively binds to nucleic acid on the 3′ side of the region and a second oligonucleotide which selectively binds to the 5′ side of the region such as to be capable of amplifying a region of between 30 to 600 nucleotides

28. An oligonucleotide primer selected from the group consisting of the primers shown in SEQ. ANNEX 2.

29. A primer as claimed in claim 28 which is listed as ORF30f, ORF30r or ORF30s.

30. A primer as claimed in claim 28 which is listed as ORF68f, ORF68r, ORF68s1, ORF68s2 or ORF68s3.

31. A kit for assessing the virulence of herpesviruses, the kit containing a pair of oligonucleotide primers as claimed in claim 25, said kit further including one or more of the following: the reaction buffer for the respective method of enzymatic amplification, plus one or more oligonucleotides specific for an EHV marker labeled with a detectable moiety.

32. A kit for assessing the virulence of herpesviruses, the kit containing a pair of oligonucleotide primers as claimed in claim 26, said kit further including one or more of the following: the reaction buffer for the respective method of enzymatic amplification, plus one or more oligonucleotides specific for an EHV marker labeled with a detectable moiety.

33. A kit for typing EHV-1 isolates, the kit containing a pair of oligonucleotide primers as claimed in claim 27, said kit further including one or more of the following: the reaction buffer for the respective method of enzymatic amplification, plus one or more oligonucleotides specific for an EHV marker labeled with a detectable moiety.

34. A method for preparing a recombinant herpesvirus vaccine strain, which method includes the steps of:
(i) providing nucleic acid from a herpesvirus genome,
(ii) modifying the DNA POL (ORF30) gene of the herpesvirus to reduce the virulence of the gene product of said gene, wherein said modification is selected from the group consisting of insertions, substitutions, and deletion of one or more virulence markers within the region of the gene corresponding to the ORF30-ml region of Equine herpesvirus type 1 (EHV-1) V592, and
(iii) combining the modified virus encoded by the genome with a pharmaceutically acceptable diluent, adjuvant, or carrier,

35. A method as claimed in claim 34 wherein modification provides a non-acidic amino acid at the position corresponding to position 752 and/or an acidic amino acid at the position corresponding to position 760 of the region.

36. A recombinant herpesvirus strain obtainable by the method of claim 34.

37. A live viral vaccine comprising an immunogenically effective amount of the herpesvirus strain of claim 36 in a pharmaceutically acceptable carrier.

38. A vaccine as claimed in claim 37 in dosage unit form, said dosage unit being adapted to provide from 103 to 108 TCID₅₀ of the recombinant herpesvirus strain per host.

39. A method for immunizing a host against a herpesvirus disease which method includes a step of inoculating the host with an immunity-inducing dose of a vaccine as claimed in claim 37.

40. A method for immunizing a host against a herpesvirus disease which method includes a step of inoculating the host with an immunity-inducing dose of a vaccine as claimed in claim 38.

41. An isolated peptide comprising a contiguous portion of at least 10, 15, 20, 30, 40, or 50 amino acids of the amino acid sequence of the ORF30 sequence of an Equine herpesvirus type 1 (EHV-1) isolate, wherein the peptide includes at least a portion corresponding to positions 752-760 of SEQ. ANNEX 3.

42. Use of the sequence of the Equine herpesvirus type 1 (EHV-1) strain V592 polymerase ORF30-ml region in the provision of a genetic marker for assessing the virulence of a herpesvirus, which method comprises:
(i) comparing the sequence of said region with the corresponding sequence in a virulent herpesvirus strain,
(ii) identifying marker identities which differ between said sequences,
(iii) selecting from said differing marker identities, a marker which is present in said virulent herpesvirus strain sequence, but does not co-segregate with markers indicative of the sub-type or identity of the virulent herpesvirus strain.

The application's sequence listing, which the Patent Office published only in electronic form, follows.

SEQUENCE LISTING (259 sequences)

SEQ ID NO: 1 - DNA, 149430 bp, Equine herpesvirus 1
ggccaggctctctctcgggcgcgggcccgtgaaaaaaatttttcggcctcgcgacggcctcgaagaaaaccgtagaggggagtgggggatgggatttttttattaggccacgcccactgggaggccacgcccactgggaggccacgcccactgggaggccacgcccactgggaggccacgcccactgggaggccacgcccactgggaggccacgcccactgggaggccacgcccactgggaggccacgcccactgggaggccacgcccactgggaggccacgcccactgggaggccacgcccactgggaggccacgcccactccggtgatgcagcggttatgcgattgtcctctcagcgctacagtggggctcactgctatgctggggctcactgctatgctggggctcactgctatgctggggctcactgctatgctggggctcactgctatgctggggctcactgctatgctggggctcactgctatgctggggctcactgctatgctggggctcactgctatgctggggctcactgctatgctggggctcactgctatgctggggctcactgctatgctggggctcactgctatgctggggctcactgctatgctggggctcactgctatgctggggctcactgctatgctggggctcactgctatgctggggctcactgctatgctggggctcactgctatgctgggccccttgtttgttcagcgcccaatacctaccaacccccggcaagaagtttttgtgccccttcgcgcgttcaacccgctccgcgacattagttgccacgcttctgtccatcgttctgaaacacccattgccttgggcgttcgcacttgcattccccggttttgctccgcccctctagggaagtaatctaactttactcaaccaacaaccctgggctctttacacacagtcttttaacaccatggcaggcctgttgtccgccattcctctgggggtaattaatggctgccactcaaatcgggtatccccactcccctctacggttttcttcgaggccgtcgcgaggccgaaaaatttttttcacgggcccgcgcccgagagagagcctggcccccatctccccccgcagccagcgtggggcccagcccactagatttcccaactcgctgggtttcccaagcttttttccattgggctcctcccttttggctctgggtatttagcttccctcccacttctcattccactttctccacctgcaccttttccatctcctctccaactcgccgccatgagacccgagggagtttcgcggggccgcgcctcctctgtctccatctccatgtgcccaccgccgcccaatggggcgcgccgcgcatcgctgggctgtgcgcccccgctgaatagccggcctgtatgctgcgccccgtcgagcgtctctctgagctcatcatcctcgcgaaggtccatgccttcgctaggctcgtccagaagctcgagcctgccttctaccggctccctgagatccatcacgcgggacccggagcggcttccgtcgaggcccccgtcgtacaccgccatcaacccagagtgtttactggaacgcggggcagagcggccgcgggcgtggacggcgagcgtgatgaccgccccaccgagttactcggaagccctgtgccaggcgccacccgcgtacgagctcgttcctgaactttcttatcaccccacccaggacccgcgcggcgtctactcgtcgcgctccgatccccaccagacctctcgaaggagacagaacccgatatgtatttttattattgttgttgcaaccatgttgttgatactgggactgttgctcactataacgctcagttcgttaacaaacggcaagaaggagaaataaaacgactgtagtaccgcaaaggttaatcgcatttatttttacatgcactcctttccaaaccccctgtacactattccgatcagcaccagaatctggagcataagcagaatgatgtttattgcggcaaacttcctgcaaaaggttttactgtagagccgccttttgatgggtcccatacgaccgctcgggtccttgtgttgatcgcagaaaccgtcgaggtaaacttccgatggtagtgcggccgccccgcggtgatttctagtaacgtcatctagatgtagcacagctggactttcagcgtatgcatcggtacagcggccagtggggtcatcttgtgtagtagtgggtgagtcggtaagcacattgcttgaggtggcggaacttatgcgggtgtactcctcgttctcggagtcgctctcatacccgtaggggctgacgcgggccggaccctgccaggccgacggggggaatgcgactctgtcgtaccacacggtggaggggcgcgtctggcgcttctttttaaacagctgtgacattttcttgaaaaacaactgggagagcagctgtcttctcagagactctcgtctgggacgtggttcaacgttgattgtggtagggtttgagacgtgtatgcgcctcctccacgctggatccatgcttaaacactttggagcgagggggcggggtatgggggcgtatgcctgaaactcaatctacagcgttatgcccggggctaaaaagctgcgtcttcacgcccgaggcgcttattgcccactgggtacggggcgcgcttttatatgtgtaacgtcccaccggtgtgacgcacgtactacggttgttctaaatagctgtccccgtgattgcctcggctgcacacatcgcctaggtttccgccgtgcctggtgtcgagggcccacccctgtaaccaacatcgatgggggcctgctgctcctctagacgcaatcgctcgccgtcgctcgccgccctggccgaagaaacggaggttgtccttcgctgcctggccggaagggtagtagacctccctggtggagatgaggtgcgaatcgctccggacgtcgggcggcccgggcagaattttggctactttaagtttcccggcccgtcgcgctttgcctatgttaagtttataggcagggcgtacgcgctaggaagcgggcgcaagtttctactgtacctatccagaaactttcaggtctttggatacgaggacggtaccggcctacacatgctagccaagtccctacacgattttttaaagttcaaaggactatctgacagggacctggtggtagtcgactcggttgcgctgacctcgcagctgcgaccacttactcttcctatacgttcgacctcggacgtggaaacgctagttgccgaggaggccaccaccaactacacttctacggaaaacctactgggccagacccagagctccacgcaccgtccgctgggtgtaccgctttccaacgtaaaaacaatgggtgtgccacccacgaaaccgagtagccaaaggcccaggggcaaggggggacgccctccagcccgcctcaagtctatccgagaggagaccgtatccggcatggcaagggcccgcgaagagtgcaactctcccagcgaacacgaccgcctcacgtccgagatgacagactgcgacagcgactcgtcggtatcctccgtctttttttaaataaaaagcaaaacaccatatacggtctgaatttatcgtttattttctcgctggcgctctttggccgaggttattcccctagccacgcttaaaattttggcctgggcagagttggctgcctgccaacactctagggaaaagggggttttgcagtggcagtggaaacacagtccgttgatggtggactcctccccgtcctcgtcgcagtcgtactgggtggcggcgctaaacggggcgctacacacgctatgctcggtggccaattcctgcatgattctcgggttattgaggatgcatttgaagttggtcaggtcggggagcaagatctgcttttccgggtccctcttctcgaacacgccgatgaaaaaggcgtgtaggcgcgtttgcagatcgcagcatgctctgatggtatacgttctggtgttcaggtaagacctgcttctggccggctgggaggtggtctcccacgagctccaagtcaggtcaagcggcagaggcgacacaacgttgctgatgtccaccaatagccccagcttgcagtcgctgctgtaacacccgccgtggttcctcccgtgggagcctatatcccgcggctctgcatcagatgagtgttctgcgcggtttgccggcagcatatttacgtttagttttccaccaggctgggaatttgctcgactgaaggtatcaagacgcagtgtacccaacccgacagccaccactctttaaactcccaagcgccgcccagtttacattttaaaacacgacaaagctttgtggaataattaaactgtatttattgatgagtaacacaaaacaagtttcctgggaaacacactccacagtttttttaaaagatttggttacagtaaaagtatttgccgtgcaggtaaaccggaacgagggtgtaggccgatacaaggctgcaggtatctgccttgcatcgccgcttgtgcgcgtctatcgcctcgagggttcccgccagacaggctccaggtacgtagtcggctagaacgcgcccgtcgggtcccagtgcgtccctggacacagtttcggcgccgctccctacagcccgagctatgcgcgccaacatcacgaacatgaaggtgggaacacacgcgacgtcagacagccgctggtggtcgcacagctctgcgagggtagggcttcccgacgatgagaggtagcaccgcataaagggctcaagtttcaggcgcaggttgtccagcagggccaccgaagaagagatgatagggtctctggtgcgcattggtaggtttttggtgacgatcatcttgcaccaagatagggtttcatccgccgacgcgagcgcctctaggaggttttcgcctcgcatcaccgcgtcgcgcagagaccgcgcagcctcggccgcgtgggaccgcacctcaaaaagcttgtacaggttaacaccgtgctcgaccagcgtgtcccacgtgattctcctcgcctccggattaaactggtccgatccgaagccgagcaccggagcccacggggacgagttttcggctctaaatccaccgtttttcaccggcgtagttagagtctcgcgcgccccgtgaaacatctcaccgatgcgtgagctggttacgcgcctgcagacatccgctatggagctggcggccgccgcgttgagtctatcccccgcggatcgaccgggtgtattagagccgtggttagcgtttcccctgcgtcggttgcggtgaactctggccacgctttgcgttctcgtcttaaaccgccacctgtcagacggtcctgcgccgccatgtccagaatctgctgagctcgaatcgcctccgcgttggcccaggcgcatgtgtaccggcaggctcgaccgctttggccagctacccgctgactggcgcgccggcacgttttccggctccggcttttcccagacacgctgttgctgcttccagttgttgcgcctgaagggtcgacggcggtttctgcgcccatggccaaacgccggccgctcgctcttggggtttgacggttgcgcgcgctgcggggacgccgagaagctcacaacaacactctttggtgggtcgccgacaacatttctaagcgctgacacggtgccaactgtttgcgttggtacaaaggcgcttttgttgaccaagccgcgagttgcctctgcgcatgtatcgcccccggtgaagttgtcttcggtgtcagaccccattatactcatttcgtcctccatgggctcacagctgctcacgctagaaagtgccattgtcttgatacagcagagtatgtcttccagggctctgtgtctagagcagcaggtgtaccaagaaaaggccaagagtgcggaccttctcggtgacaggatttttatagagacttagaagccgcgcccacttgctcttaggacgagaaggactcgcccaataagccaatttgaatacgctgttcgtagtgcagcagaatcgacacagcgcctatcacaagtagcagatagactagtttcccacacaggttagccagcaccgtggagcagcaactggtacacaggcccttcactccgtgggtggcgggagtcggggggtttgcgctcgagccagtctttgggggcttttcgtagataatagccactatctccactatagttacagccaccacaaacccccacgaggcgagtttaagataaatggggtatatctgagagcagggggtgtgaaccaaggttacggttccaactaccaagagtctagccacaaaatgcgttcccacctcgagtccgatgagcgccagggcggcgctgtgctcgcagagaaatcctatggggtcacgtttaaaggtcctgcttagagccacgcggcgcagagacgcttcgcacagcagcagagcaaactttgtgtagtgcgttttgagcacggtggtagcaagcgtataggtagcatagttgaaggtgtagccagtcggcgataagaactcgttttggtttctaaagggtcccagcaagcggcgctcttgacgcaaacacaaaaacgcaatgtagataagccacgccccggtaatcatctgcagctgcacgctccacaggtaagccctacagttgcgagtgccaaccactattcgcactttgtcgtgcagctccttcatgttcttcaggacgtcgagcttggactcgtttacccagttctccctgcagacgtagtcaaatccagacaggccgtcgctgaatcgcttcgctccattttctgggtacgcatacactatagtggagttgtatacttcccacttggcagcaatcccatccttagagtctatggaaactgtagcgtacacgcaggggttgtgcagctgggcggtgagggtataccagatggtaaacgcggcataggcggtgataaggcccagtacagataggtatgccgttctaccaccgagtaacatggcgctagctggcctatttggctctgtccacctctagcgtaaaaatggtgcacatcttattgttgccgcattttgtagcaaagcactgttgacttatggacgcgcagagtctgccgtgcacgtccgcacttatggacagaaacgtacgagccagtccacgtgccgatcgaaggtgcttggcgcgcaggcagctgaatccctgtgatctgtaagcgttgccggatcggttgatttgcattaaaatccagtcaggcttggtaacgacggtgtgtaccccaaccgtttgatattcgcccgattggtcggggaagtgagtggcgaggtgggacaccacctcaccgagtaccacgtcgacaacaaacgcttccaccgcctcgtgagattttatagacacgttggcgctcgacagaagagactctagcgtggcgcgtttagtcatgatcgcttctctgtttcgagctaccttgcgctcaaaaaagctgacgtaatctccacccaggtcggtgattacgtgagttattgtaggatggcggggggccgcgtgaaagtgaaaattggccgggttcgaatgctgcgctacaaactcatctacatcgttgcattttgggggaatcacataaaaaggatagagacctccgtaaacttcaccagagtcgcccactttgcaaaaaaatggaagacgcaggctgcggccgtgcgagtaaacgcccgtgtcgataaacgaaaaatccctcaaaacggagcacatgctctctgtaaacgtgcgctccagaacaacagcctgctgtataattcgcgccagaccacgcagtgcttccggccctgccaggaggtaagggggtggcacaggaaccgttacacggaaccccattttttctgtacactcgcatgcgtctgtgtcatcgagtcgctgcagcggcgtttttccaccctctttatttgggggtgtattatcacatgcggcctgtgggcattcattgtctaccatcatcatctcatagtcgtccatcggcccatcagtgtattcctccatggccgcatagtcatctataaagtctgattccatgtagcactcctccaccccgtcaacgtagtctgggaaagacgagggctcgcccctatgaagcgctctaacgagttgagggggacacgaggttttgtaaaaataacacgggtaagagtcccactgtacggtggcatcggaaaagattagtgataatgttgttatgatgccggctctaaaaccgcgcattgcgaggtgaagcatgcccagcggaacccgcctcttgatgccaaagtctacatccaagatgatattactgaccgcgagcgatgagttgaaaatttcattgcggttgatgtacatctgggcagacgcgttagaggacgccagggctgtacggcatacgccgctggtcgtgcgcgttagctggaggtcgcgccatgccagcgagcaatcgtcaatctctccaaacccggctaaagcaaagcctccctcgtacgcttgtttactaccacccgggcgcgccagattttgcgttgtggtttcccagcggtcattagctatgacagcaaaagcctggcgcttggaaggcagtgccactcgatagactggagcggggccgggaactcctttttggccaaatagcacttctagcggaagggctctaccgtttactggtggtgatgatgcaatgtgtaatagccgccgagatattccacactgggacgatacacccggggagagctcgtcaccacgcgactgatccagcggtggcgtggaatggacactctggggtttgttgggtgaaactatggtctgtatccagccgcggccagccagcgaggattccaccctgtctagtagcttcaaaattggtgtagaggtgtcacagacaccaagcggagcgctcccagtagacatagtcgtggacgatggggtgtaggttttatcctgggcatactggctgcctatagacgccggcaaacaaaccactctggggttcacgttgtgggcgatgtagtctctgatattaagctgaattctcacctgagcaaaaaatttctcaatcgttccccttttcagggacgaagtagatgttatgcgatcaatgtctccagggtcggctatgctgacagcaagcaggtggtcatatagctgtttgcggttgaagctctcaaagtgggcaaggtaaatgtaggtaataaactctcggtcagacacgcgtagtccctgtctgtctgccgcgatgaacccctcgagcgcgcttacttcggccacgtccgcctgaattcgaaggtcgacgtacctaggtagcgccagtgcgcacggccctctagaataccaactctgacagcaaaactttgacaggagcgaaaatgatgtaaggtgggtgagatccagcccagtggggttaggtgcggccggaacgttatacgttctaataaagtcctttactgcctgcaggtcgtaggtgcccccggatctggaacagcgaatggcctggaataggtaatatctggtggccagcacaatctccctctctccggggccaaacttggaagcgaaccaaaacggcgtggtgttgttgttgcagtatagacgcctgaacgcggtcagcactttattctcatggtgtatatacacggaggtcaaaccggagcggccggtgctgtgaccgataacggcggccttaactgatcctcgttgggggtcatacttggcggctgctgcggttcgtccgcttctggcggtaacattctctgtagttatcgccagagccaggattaagtcattgtggagcagaaaggtggcctcttccgttaacgcctggagcagtgtattagacgatagcgggtggccgtgtgatagagtcattgccaacgcccgggctccggtccacgtggaaaacacacacacaaacattgggcgtacgcggtcttgtggctcgtcactagcacctcccaccataccgcttaacaaacaaaagcttactgatggtttccgctgtaaaagcgcggtcgccaactgatccgcgtctgactgctcagtggagctccagccgtcaccagcatctgtgtttggcgcgcggggctgtctcccaaacagatcatcgagctctgaactccagtcgtagcttatagcgtacacaccctccgagctctcctgtccggtcagaagcatcagcgaatacgtgataacgcagctgtcggtagcatagagaactctgatagttggctctgggttgcgttgcgccatgtttaagtggctgatgtcaagtctatgtggaattagaaactccacatccccagaagtttatgagccaattattggtgggcagaacccagctaccatgctccgcctacagtccgctctggctgccgtcaatgcgcttctgcccgcgacccttactatagaggacgtgatctcctctgccgacaacacccggcgcctggtcaaagcgcagaccctggctcgcacatatcaggcgtgtcagcataacatagagtgtctatccagacatcgggctagttccgacaacccgaacctgaacgccgtggtgacaactcacatgataaacgccaagcgtctctcgaacacctgcctcgcggccctcatgcacctctatctgtctgtaggggctgtggatgccaccacggacaccatggtcgaccacgccattcgcatgaccgcagagaatagcgtggtgatggcagacgttgctgtgctggagaagaccctcggcctggatccccaggcaaccgtccgggcacaagacttgctggccctcaacagtggtgttttaaattctgtgaatgccgtagccgagatgacagacccgacagacgacgtcgagtttacccagagtgtacacagtcctctcctcccccggcagcttagcaccacggaagtagttggcgtgccatctccagtaaaatcaaacctcaaatctaaacacaaacccaaacgcaaagccagtttggttgcggtgtaaacaaaaaacaataaactattcagagttttttataaacgagtctgtttttattttatatctacctaacagtcatcgtaatataatcacgggtagttttttataatccggttgagccaaaccctccatccgcgcgtaggctggagggtgcctctctatcgaagtcggtcgtaaacttccacagtacggggctttggggcgcctttgtagactcagagggggagtacgtgggaaaggggttgtcgtagtttacggtcggcggtatcaacgcatcgtcaatatcttccgtcagcagtagctgcgcaacgcgctgacccttagtgatggaaacaggatacttattgacgttaagtataaagaagcagcaggttctcccagctacccacctagtcggtagcactattagaccccttcgattcatagacgatcgcccaaagatacacggcgtgacggcggggttggaattagcgaagacaatcggcaagtccacaaagtggctctcgtccgggtctatagtcgcgtcttcaggcgcgctgatgtcatatccggcatcctcgacacgcttcggagcaaagtaatcgtaaaacaggttagcttccgatgtacgcccatcccttgtagagccgatgctagtcacgtggatgctcttcctggccagttttaccaacacgagacccaagctcatctgtccggggggcacggacgtgttgatcccaggtgcgaattgtaccgctttcacgacgccgcgatatcccgagtcgactataccgtaggcggtgtaatatttggcagagttttcaggaaacgttacgttgctaaaattccctggctcgggttcaacaggcaacaaaccgctaatttgcgtgaggacaatggcatatccgctggagcaggcaacccgtacacctacgtcagtgagcacactataaaattcgcccgcacttccatgctcaccactcagctcaactgtgtggttgttgattaacaccaacaatctcccagcagcttctgctcgcgctctccatctctcaccacactcaaccaccacgatgctgtccacgagattcgtgacgctggccattctcgcctgccttttggtggtgcttggtctggccagaggggctggtggcgacccaggtgtgaagcaacgaatcgacgttgctagagaagaggagagacgcgacttctggcatgcagcctgctccggacacggattcccaattaccaccccaagcacggctgctattctattttatgtgtctctgcttgcagtgggagtggctgttgcctgccaggcataccgcgccgtcttgcgaatcgtgacgctggagatgttgcaacacctgcattgagcaactgtgtatgtataactcatcccggatattgtttcaaccgtttgactgtataaaaaggctagctctctacctacaagaatcattagtgctgaaggttcctttcggggtttacagcgctagtattagagttttgtaagagtttattattagcaagtgaatatgtccgatacgtggcgtagacgtcgcagtggctgtaacgatgctaacgctacggaagagcttgtatactctaccgttcgtagcgaccataggcaacgacggccctctcgcgggacttttgttatgcgagaaaacgacctctacgacaaacagagtgtatctaaggaaaatgacttgtacgaaagcgctagcccaaacgacgacaaagtttataccaggcgaggtatgagcactgccgcgcactatcgtgactctgaacacatatacgaaacgtgtgagggtgatgaattctacgatgcatgcgaatattctctgattggcggtggtaaactatcgacctccaatggccgccaaagcccagcaaaagcgcaaccacctccaaggggagcagctgctgctccacccccacgtgttccaacgcgaccacctacacgcgcggcggctacttccacgacgccccggcaacaggactgcgctcccaaacagcgcgcctcgcctggtgtaaactccatcaagagcggtaagggcctcgcgtttagcggcaccccgaaaacgccaaagagtaagtggtacggggccactcacctgttcaacaaaaacgtgttttgcgcggccgtgagtcgcgtggctgccgcacacgcgagcgatgccgcgtccgcactgtgggacttgaacccgccaaagaccaacgaggacctggacaggtttctgaaggccgcggcgattcgcatattggtatgcgagggcgctcagctgctcgaggtggcgaactctaccatggaaagtacccccgatgggtatgcggcagctggacccaacggttacgatcgtcgacctcgtacagcctctagacggcgatccctgaaatgtaaaccaccggcggatgactttttcgacgacacgaattccggttaacgcttatttgcataaattcataacactgtgccctcaataaaatgtgcctcttacatatttctttaccttatttgtcgtgtgctctgttacccggctggtattttgacgcgcgcccgcggcagcttcaatagttatgtttgctgccgcggaagagaacgatgacccctatcccgggaaatccggctataatgacacctgcgagctcatggatatggacggtgctgtcgccagcttcgatgagggtatgctcagtgccatcgagtccgtttattccattccaactaaaaagcgtctggcgctgccaccgcccaaggccgccagccccggcgcgctataccagcggctacaaggcgagctgggttttccggagggccagacgcttctatccgctatggagaagtggaacgaagacatgttttctgccctacccggacatgtagatctatacacagaaatcgccctgctgtcgacctcagtagacgaggtagttagagcaggcctcgatagcctgcccactcccagccactatagccccgaggtagacttgaacgcgcatggcgacgagcccttcccagaggttcccgccctggaagacgacctagaaatatacgtgatatcggcacagcgcttttacctatcagagcttcgcacgcgcgaagagcactacgcgaggttgcttaggggctattgcgtagcgctattgcactacctatacggcagcgccaagcggcagcttcgcggaagcggctctgacgcatctttgatgcacaagtttaaacaggtggtgcgcgacaggtactaccgcgaggccgctaacttggccaggttgctgtacctccacttgtacgtatctgttactagggaggtatcctggcgccttcacgccagccaggtaatcaatcaaggtgtgttcgtctcgcttcactatttttgggcgcagcgcagaaagtttgagtgcctgttccacccggtgttgttcaaccacggggtagtgatcttggaaaacgaccccctagagttccacgatctacagcggataaactatcgccgacgcgagcttggcctaccgttgattcgcgctggtctcatcgaggaagaaaacagccccctcgaggctgagcctctgttttcgggaaagctacccaggactattggctttctgacgcaccagataagaaccaaaatggaggcatactcggacgcgcacccggcgaccccgctctttcctctggcggagcactcctacagtaaacggatagggggacgcctgtcatacggtacaacgaccgaggccatgatggacccgccctcccccagcgcagtgctgccaggcgacccagtcccgcctcttaccgtgggggtgcgtcaaaccgccgcaacgcttgctattccgtctaacctcacgctgcagagcatggaaaccgacggccttgactactcatcaatgacgggcgatgagctcaaccagatgtttgacatttaatacaataaagtatgtttccagacttaacatgttggccgtattttccgtcgttgtgttacgtgaataggacgtagtggtgggagtgggcgtggtatgcgggggttctttgtttaaattgggcccaggcggatcagtgccagttttgtttgcattgggggcctgtgcggcatgcgacactcctcaattgcgtatcttcagatatcgcccatttaacagtataaaactagagagtatggcggttttgaagcttctaccaagcctataaaactagcgcgccgtgcagtgagatgggtgttgctatctacaccagatagcaggcgcttctttttcaaaacttggcggttgtacgccagcgatacggaatcgggtaacatggaccagcatcacggcgcgcgcggcggagctccgatacgccgacctcgcagatccatagaatctcgctcccacccatttcgcgctaccggaaatacacagcgcacatacagcacgccgagactcagctatagagacggtctgtccgggcgcaccgcttcgagggacccccaggaacaagcttcgaaccaggatgagagttctaacccgagcacctctaatgctcaacaaagcacatcattctggggatatcttcgacgagttttctcagacgatgtccccgcacagccacaagcacccagacctcgcgcggactttgcaccgcccgccggcgaggaatcatctagcgaggaagaggaggaagagggtcccgcccaagctccgctggacgaggaagaccagctaatgtatgctgaccagtactctgtaggggactctagtgacgaaaacgacgaggaagaagacccccgtctaggatctgactatcccacgtccgccgaatccagtgaataccatgaccatggtgaaatggtggccggtgcgggagccgagagtgagtccgagacagatattgacgccgaagaagaagaagaagacgacgaagacgatgaggatgatatggaagtaatacgagacgaaagctatagacttcctcgtacatggttggacaagtctatacgtttaatggacgaggccctcgctcaatcttccgaattatcgaaggctatcactaaatctacgcgcagcttgtacgatagccagtttgctcccgggggtagaggctacacacagacggcaacgccctctcggcgcctggtacagctatcgcgcgctggaatgtacgattcggataaaatagttatgacgggggactacatggaggttgacgacgatccagacagcgcttaccagttatgggtgcgagcaattcgccacccactagcgatgaacccgtcatgggaggaaacaatttccaaccacaccaacccatcgttttccaccgacatcgactatgatatagacgagctaattgaaaaaaacctggcccgcacaccccctgtgtttgagggattactagacagcgcagagtttttttacaaactacccatgctatacacatacgccaccattacgcaggacgaggcctacgaagagcggctagcttggtccaacacacaggcgctacatggacacgaacaaagttcctggcaggcactcctggtctattactccagggggggaatgtacgtatccccgactcaagaacctcgagggatttggcggcgcgcgctaaaacaggcgatggcgcttcagctaaagatgtgtgttctcggcctatcggacgtcgtaacaaagcagaacgctacgcaccaccataccgcggtaacatttctcgtggacgcgcttctcagaaccgctaggaattgttacttggcgagccggcttctggtatttgcctgggagaggcgcagggaaactggggcaaaacgccccgcagagcccctcatagcactctccggggttacactcttgcagccccttcccccagaggtgtctgaactgcttgagcagcgtacatttgacattgggttgcgcacccccaacagtgctgtgtttagggcgtttttcggatcgctggtgtattgggcagaactgcgcctggctcttcgagaccccgcgtccataaactgtcgctatgtcggattccatctacagacctccgaaatctatttgctggcgcgggcccactccgcgagtccaggctacaccaaagaagaactggtggcaatggaggctattctaaccctcgctacactcatgctagaggtggcgctgcagtgggttcacgtggcttgcgcacagctgctcagcgaaaacgataccataaaagcctttaggcgggtcagcgcatctatcccgcacgctctggcgccccttggtagcatacgcctacacgacgccgagtttgaagtgctcagcaacccagatgtgatggtggctagagacgaaaccgccctgagccaggcgctgttcctcggttacttttccgtgaggaccgcgctgaccgcgtgcatgcgtgattactcacacgaggccgacggtggatccaaagaaaccgttacaggggtgtttttgggggtgggcctaatccttcagcgcctggcgggccacctcaactttctactcaactgtttggccggggccgcgctgtacggcggccaaaaaatcaacatacactcgctaactctgccgcgatacagcctattggcggatgtcatggcccccatgctccagcggcagtccctggtcgacttttggcgggcccgcgataacatgttggaggatctagaaataacacctcgccccggccctcctactcagggcaagcgcgtggtggttgaaatgccactcccatcagacgacctcccagacatgacccccggcgcttccgtcaacaatggcgccggcctgggacgcatggtggacatggccaagcaactacagcactacagagaaacaatcataggggaagaagccacctcctccgtgggaaaacgtggtctaatcagagctggtgtgggcgtagccgccctgcgcggtaggcggagaaagtgagaagattaacactcggaagcacttaatgctgtttacgtccggaatctctctcacatcccttaagcacttccccaaaaccgcctctccagcttacacggcatccaacctgctatcggtcgtagcgccgctccatataccgactagcttacaatggacggaggggggtcttcttcgtggactcacgtttccaaaaacctaatagagcggcgcgctgtcaaggggtgcctgctgccaacccccagcgatgttatggatgccgctgtgatggccctgaaagacgtgaccgagaacattgtgggccaacaactattttcggtagatcgtactaacgctctgtctgttattcacaccaacgaggttccggagtcaataattgccacggccatcgcacgcgacacatccagagactacttgagggaatatgaaggtgcggctaagtgtaacttggcagcaacggatctatcgcatgatgaaatgtgggaagtggttatcaaaagatactggcgctacctccgcgagtccagcggcgcagaggttgtcgatcgcggtgcggtgggtcaggcgactcaatctgtattatccgtgttgcttctccagtccaccttcggcaaaaaacgcttatctaaaaatcccttcaaacacaagggccctaatgtcggctacaaatccaacctggaggacctgcgctcagcgtttacaaaaattgaaaagtacatgtactacatgcgccccaatgatcccatgacgaagagcgaagacacagagctgcgcttacacgagctactggcgtacgtgaccacatgttatcgatggctgttgtggttcatggacctgacagacgccaaggtgctgagaaacatagacaaagggcccgttatcacacacggccctcgcgagtctcgccctccggacgaactcgtgcggcgccacctcaagagcggtccggcaatttccgccggaacgggtgtggctctgactctgtcgacggccaccgccgacgccttgatcgttttgctgagaatgagtgtttcctggacgtcccactcgtggaagagcaatacccacggtgtcactggtgctatcgtggccgccgtggagctggtcacgctcatccaccaccacttacagtacattattaacaccgtatttgcaggctacgtgtgttggctcgatggtggcgtggagaactcatatctaaactctgccctccgcagccagggtaggttcgatcattttgttggaaaactagtgcccatcatggccaccctcagctgggcgaatatggaaaaggggacagtcatgtggttcaaatacgctctggccaagagtatagtgtgtcatggatcgcctactcagcactacttaacagtgctagaatctatcgcgtctaagcgcactggcgcctgtcctccccagggatcaacctttggacgcaacccctccggttttcccggacagttttgctgtcctccccaagggccgctaccggcaccccccaactctaaaactcgcggcacgtttaggcgatgccggcccggcagcttgcgcagctccaggcagctaccaacctcccctccgtcgaacatagtttcccccaggaccaacccggcaatagaagggtctacggctgctaaaaacgtccagggggcggagaccatccaagtacgctcttctggagaatttaacgactgtatctggtatataaacggagcatatccccatcaacgcagcgacagcagctcctccgataacagcacatgttccagcacggagactcagtatataactctcccctcaacgccatcgccaaccggggacgttgtttacaccaatccactccttgggcccgacgaggaagtagacgcgagcccccaacccgttgatcctatgagcgactactctgcgccaaaaaatcccgactatatgcgcccccgcagcactctggtcgaggaggtttggcagctgcgagactccgattacactccctacatgcgccccagccgccccagccgtgccgggcgttcccgcgtgagagtggaagaccaaactctggaaccatcgtcccccgccggttgtaatccacccgccaattctccagaaaacgattcagacgatgccgccgttgactcacctcccattagcccggaggttgtgtatggtacatttaggcccagggccaagtgcgtctatgaccaatacggattgaccgcacttgctgccctaagcgcctcaagagcaaaggccaggcggacgcgccccggccccacccaaccagatgtttgccgcgagcgtgacgaggaatctgcagagcccagacatgacggttttatcaggcgaaccatgtctacgactggaccccctagaaaacacccggaccagacggagcgtgttagctcgctgtaacccccacctactacctaccctctatgatgattatattaataaaacaattcaaatgataaaattgtgttactctttatttaaagtacatatataaacaattttaaacaggtttttgcgcgacgtgtatagcgctatttatttcagcgcatcggtttctctattaccggggaaacggtatgatgtggtccagacgaagcgcttggcgggccttgtagatcagctctccaagcgggctgagtgggcgggctgcatagcacacaccaaaccccttggtgtagcattctgcgaagctcggtacgttgcagtaggccagctgagtatcattgaggttgagcttattcataacggattcgctatctcccacgttgaggcagtccagcagactcattattaggcctgcagtgccattagaagccgccatctctgagtactcttcgcatactgcccccaccccgctgatgttgcgtgtgttggatgatgcgttcagcaacaccgggcgaacacactcgtcccccagaccaaaagtctctgcgggacacggtgccgtgcgtagcgcgccaataggtactgttaatatgaaggtggacaccagaatggcggttgtcatcaaaacccccagcgcaaacatgcccatcgtaaaaaaaaggcagcggcattttgctttgcgctttgttctgcgtcgctttgtataaacaagctcgttgggttgagggggggttgacagcgggggcgcaaacaccggaacggttttcgttggtaaggggggagcctgagcatcgacggtggcggtttccagctgtagtaatttataatcttccatcgcagctgttgggtctcctgccatgttgctttacttagacgttacggccgcatagagatcagcgtataccgcagagtataatggctttataaatatcaccgggtcgcgattgtaacacaaacccaacggttttcacctagcgcgtataaccgcatatttttagtgccatattctcgagagtgagtttgtgcgtacggttggcctatgcggacgacttgtgggagcccacctactgtttttaccagcgcttcaaactgtagttttgacaaataggttgtttgggggagagcggtccagcctaaaagtcagacttcttgtacggcgcctgtgagggcttggagcagtaaaaacaaacggctgtgatgagaacgaccagcgccagtgccgcggccccgcaagtaactgcgatgatgctcgtcaaaaccggcctgtcctcaacaatcggggaggcgtcatataccactgtgtccgaaaacataggcaggccgtcggggtacccctctattatgcagctatactccctctccccattctcttctgagaggggccggcggctttgcatgttaaccaatcccgagtggctagggcagactccggttgtcatgtcttgcgacggaacccctggtaggtggtcgttcactgaccacgatacgaacaccccggtgctcggtacgcatttagccgtacagacggcgtctccgtcttctaccgaaacggacacggttggggcaacaaacacagagggtgttccagctttggctatgcgagcaaatgatacttcgtccctgtaccagtctatgctacagcgaagactgggtgtgtattcctcctccggatcaaccgggatagacaccgtagagattcgcgtgattagcccgtctacccacacgcttgaggcgttcgtaacgtactttgtaaagtccacctcgcgggcatttttgtaccaccgcagcttgacggagctgtgtggaaagtagcttgcgacgacgcacgtggccctgtagttttcccccttcaggctcgggtgaacggaaaggtccagcaacggtgcgttgtaggttgagacggtaacgctggtactgttaacgagcgtgccatttttggcatacaaggaccacacgtaaatgccggccgtccgccaatctacagatttgatggtcagtggaaactttgtaccaccttccgtgtggaggggaaggttaaacagctggcgctttggtagcctgtctgggataactcccagctggccaccccttcgagattttttcctctctgccgttgagaataacagcagagtctgatccttggtggcgttatggttgatgtagttttcttcgtcgccggggggcgtacccgaaaatggggtgcgctggttcaagtaaatctcgaggcggtactcgctataatttacgcctaccgacgttgtacagttcatatcgacagatttgtagtagggcacagatatgagactcttggtgcaggtgattgtggtttcatgggagtgtgtagattctgtaccgtttgcgttagttgtgttgtcagagcccgcgccgtgtgcggtagttagattcggagttgtgtgagttggtgtagcgggcgtactctggctggagctagcactagctccagaggcataagttaatatcgccccggcacagattagatacgcgaccgccacaaatctcacgagattaggcaaccacatctcgcgggggccgggtgcttgctattccccacgaaaaacgataataactccactggtcggagagttataaacataccatgcaccaaagggtcagttttaaggggttttactttatgtgaattcaccgacgttagaagcaatatgctatacagtcgttgttattactaattggcatgtttaatgtgtgattatagttgcataacacaaaccggcggcaacatatacacaaacaataagccacctcgaaatgtgagttgccgccaggcggcgcgcgcccgttgcgcgcttgcgaaggtatagcgcccccagtatacccccggatacagtaaatgcgagcgagaggggagcggccacgccgtacccaaaggcggcaagcaccatgcagacagcgtgggccgtggagtgaatgccggaactcgcctctgccgtgtagtttactctgatgacaagctgctccagcagcatcgcagagacgtgtccaacagtcagacagaagacaacatacgccggggtttgccacacgttggaaattccgtagaccaagcgtaggacgatccatattatgggggttgcgtgagttccgaccgctggggagaaaatcacccccggcatctccttgaaaaacttgaacagcgaaaccttttcttccgcgacttcttcgatcttggggacggcttcaacgtccgtcacccatctgtagttaataccccggccaaggtccgtaaaggtgcgcatgcacgcataccgtccgattcgatagtggcatgtgtctcgaagagcaagcccaaagtcttgacaggaagctataatagcgatagctatccctatccctatgggtacatctttcagctcaacgagctttacggaaacccctagcacacatccaccgataatagccaataggctcgctctaaagtgagtccccgttccattggctgagcatatgacgtaaaatagggaaatttgagttccggctataaacacaaacaaaatgcaaacggtaacaactataagtaaatgttcctttttgactgcagatcccgcgacccagacactggctgccactagagtggccagcgcctgtatcgatcgacatacggttactatagtttccatcttagatatgggtacgcggatcaggctcaacacatacatcgagatgatcatcagaatcagacatgttgagttccgggttagcaggtcaatgtgtaagatcgatgaagtgaggacgcaagcttgtagtccgattccaacgaaagctttggaggccgcccaggtacatggcatgcagcccctctgggagccggtgcagcgttggaccgaagatgagcttagcaccagacacgagtcttcaccgggctctctatctggctggtacatcatgattgataaccttgatgtagcaagccaacctttggagagtttgaggtacagggacccaagaggatggttttatgcaccaggtattagtcataaaacaaatacttagtgggcgtgtttctacaagtgtaaatagttttaaccaaatagtgaaactaagcaataaacatttccgcgtctgtcgtttacaatatgcgtttttattttcagtatagcaagcatggtatacttatactattacaggtcactaaaaatgcatgggctgttccggacagggaattttcgctccggttttgtccattaacaaaacaaaatttgacttaaacagcttcccgtcaggaaatagttttttggggggctggtcgctttcttcctcctccgacgcgcgtcgctttactccagcccccattggggtcgatgaaaaggcagcaggggaaaacccaacctggcacggctgggtcgggtacgaacacataaaaaacatcatcacgctgaacggctgcttggttgagagcccgatcatgggaatagagtctggatccaggaaaaagttaagcaccgctcccgcgttttttagtttaagcttctgaattagctgcttaaagttagtgtcctcatcgagtaccagcgtaaacagacggcgaccgctgatgccccttatgggttccggcgccgactttttggtcttcatcggcatcttttccaataggctggaactcgactctacgccgcagttgtctgcgtgctggtagtccaccgaaaacacgacttgccgatctccggatcttacctggagagtgtcgtcgaaaaggcactgaaaggtgatggggtcgccagcttgtttacaaacccccaaaattttgttcagctgagccttcgatagagacatagaaacatccggctgacgagtgggtaacatgagtgcatagttgttgaactcgtgtttcaccaaccgcgacgaaacggtctgagttgctccctctgcatcagatcccatctccgtatcttcttccgtttgatcgcgcgcggagaacaccgtctgggtgagtattctactaggagaatagttttctatctcgaaaactaccttactcacgttcgtctgggtcttcgccttgaaagcgtccagtaaacccctgcgcccgtctacgttggccaaaaacacggcggggggggcctttttccacgagtacgactccatgttgttagtctggatgggtatgtatacctgctcaccgccgacgctggtgtgaattagcaggccgtcctcgttgaagatcagaaaggcgttcttgaggctaggggcgatgggagtgagcatctcgaaagcatctctcagagattctcgctcgaaaaccgccatggcgcgctgtctctccactgggttgtcgatgaccggaagcgtgttgaataaaaagttgttggggtgagacccgcctggacgcatcgcgcgaggaagagccatcgtcgatgaggagattataggctaggctgctcgcgtatctcgaagcactctatattagagcgaaacaagcagtactttgacctaccccgtagcgcttcttatagagtttcgcgctagagataaaaggattaacatgacgtaaccaggggagtggtttgggggaaaatggggcttggtttaccgaaaagcgaaaaaatgggggtggtatgtaggcgtgggtgtgtacatcggttaggccacgtcagtgggcgcaggcgcaacaggcggtgtgggtctgctttggaaatgcctatagacgacagtatcgtgttattgtaaaagtgaaagtttagggaggggttttgatggtgggcagagctaaactcaacaccaatggaaagcttgcctaatcgcgcacaccaatttagattttcgactagagtagaactctgcttatattagctcgctttttgggagcaccggtcggagttactgctgggcaagttttggaggttctacccggtgctcatttacttccccactcctctggtacgggacatcgttttggcgccagtcggccaagagaatgggactgtttggactcctaaaatacgcatactccaaccggcttgtgaaacacgatgccattacaactccaccgggaattatgacaccgatcgctatcgatctttggaatgtcatgtacaccctgatggaaaagtttgaccaggagcgcaattttcccctggatggcgcagcggttaccgcacggtgcttcttttccctactaaggcttttgttaaagaggtcctactatcccatattcgtgtccgacagaggcatatacggcgatgggcgcgtaaagcagggagccaaggctattgttagtcaaacaatgagcagctacggagggtcagggcgtctgtcgagcgcatgctttacaggcgacgaacacgataccgaattccaggaagatcccgaagaaaacgatgtctcagttcccccgcaagacacgtgtcccccaacagaaatatctgccggttacgtcgaaccggagcgcaagtgcgagcatagctccacgcgctggagcgcgcttgatggagccccgcgcctttcctaccgtctttgtgtcaatctgattcggcacctcggatacccatacgtcaacgcgtgtaacctagaggcagatgacgtttgcgcaaacttgtaccacaccaatacggtcgcgcagatctacactaccgatacggatctgatcctcatgggctgcgacattattttggacatcatgccgctgtttccgccaaccctccgctgctgtgacgtgttaatggacttgggagtcacatatgacgagtttttgaccgagtttgtgcgatgccacacggatctccacgagccccaaaccctggcttcagtgcagagcgtaattagctcgctccactcgccccccgacgaagatgaaggcgccgatatgccgcagactccctcaggacactcgtggcgctgccccaacgagcgccgagtcatttcttggcgcagacaggacgaccatgactacgactcgtctacagaagatagcgaccagtcggatagcagcgaagaagaggaagaatgtccagccggtaaaggtttcggatacagagaaaacccggccgtagaaacttgtaaaagacgtacgaggcctcggcggtctgcggaggcctcaggtcgtattctacacctcaagtacacgtctagatatcctccaatcatggaatcggccccgcgcgctttagtgagaatggctccccccaaaacccgccacgaggttctggagagaaagttcgtaaagcatgtcgtttccatgctaactccagaacgtcgaggctcgttgtcgataatgcgacgcctacccatcacccaggagccgtcaaacttttctctggtccacgataccctcaaaaacctggtttcagaacacgagattgctcgggagctagccaacatgttttggaatcacattcccaccccaactgattacaacacggtgctggtcaactactgggatgactgcggacaccgtagacagtggtcgtgaataaagtttgttttgaatttcccacattacatctgtgttttttactttccgcgcgtaaagcttacacactacccgtaaataagcacgctttaaatcaaacaacaacaggttgtatggctgtaaagggtatgtttttatttacagatcgttaattagagttccagagtatgcggtgctgcgccgctcaaaaaagttagtgtgtttctcaactgtcatgaaggcgagaggaaagctcggggatggtttgggggcattaaacaggggggatagtcctatttcacccaaaaggcgatccgcgctatagcgtacgtagctgatgatggccccgatgtccaacaggtgactatattggggagcgtgggatagcaaaaattcacactcgatattcaccgcctcggagaacagctcataaatccttttgggctcgggcttctcaaatccccccaggtagttgttgtagatgcagcacgaggcgcgagtgtggatcgcctcgtcgcggctgatcaaatcattgctctggcacgttaccacaaataggttgtgggtacggagataggcgatagacgcaaaggacgatgcgaaaaagagtccctcgatgaggatcatcagaatatacttctccgccacagatccgcattcacgcacctttgcctgtagccaggcaaccttccgtccgatggcagcgtctccgatgatggacgctacatacctagcgcgcgcggctgcgtcgtttccaaacaacatgagctgtatagcgctgtataccctggagtgtgtaacctcaatagactcttgctctatgtagtagtggagaatgtccttttgagtaaacagagctgagagatcgcccaggttcaaattcaccaagtcgtcggcggcagataaaaaggcgaacaggaaccggtaaaactcgcgctcggccggcgtgagcttggccacgtccttgaggtcatcggaaatgggaaggtcggtgtccagccagcggtttgcaacgctgagcgagcgcaggtgctcgatatcggggcattctggagtataaaaaaacgcacctgctaatgataattctgcggttagggctgcttctttagagttttcgatagacattcttattcaccaggtgttttgtttgaagcggcaaggcgtccccactacaggctgcagctagtacagacgaggtccccgccgacaaagactccgttgtttgttgctttcttaattttgcagtagtacataccggttttgaggccgcgcttatatgcgtggaccagaaggctcataattttggaggcggggagttttccgtcagcaggctcagttataaacaaagacatggattggctctggtccacaaacggagctctgtcagcacacatgtcgatcagcgttctctgatcgtactcaaaggcagttttaaacttgcttagggggtggcccaccggcaaatcaccaaacgccccgacaacagaccactgcgccatctcgagggtagacagcgcctgcaggcgcgcgcactcccggggaaaaatactccggatggtgcgcatgagcaataaattcggcctgagcacctccccagtagccgtgaccttgctaaataggtttgtgtagacgggcgaaaacccctcgctgctctctgtaacctgagacgatgacacggtaggcatgtacgccacaaactgagagttgtacagcccatgctgttttatctcggtgcggagtctgcgccaggcgttgcggttggcgagggtaaccccggggtacgaatcgaagggtagttccccgagactgtacttgctgtcctcaaaccccttaaagggtttcatgccgagtctgcatagcgtcgcgctcgctttcatggagttcagtaaaagcctctctgctatctgcttgtttaattggcgagcctccggagaagccatgtccaggtctagcatcaggaaggcggtatgcagcccctggatccccagtcccagcgacctattttcgtcgactccacgctgagacttgactgttgggtacgtgccggcgcgcatcatggagttgacaaagatggtggcagtcgccgccgcgcgacccagagcggcaaagtcaaaataaggcacgcccgcggtatgcggcgggggtatggcgaggcatttggggaggttgatgctggcgaggttgcacaccccgttttgggtctcgtctgcgtgctggataatttccgtgcacagattggaccccatgatagcaccttttctccgcagatcaaagtggtagtgcttattgcacgcgtccttaaacatcaaaaaggggcttccggtcattacagcactcctgactatgatgaaggccatgtcctggatgggaatggagtcgaccccaaatccacactgctccaggcgctcgtactcctcctcaaattctttgccgtacatatggcatagatgtgacgctgtgtcgtcaaacagcgtccacattacgccgctctctccgtccaagtaccgttgatagcggtcaaaaaacaggtctggggtccacatgcaggcaaagatgttgtcacaccgaacggtttcgtctctggccagcatcccgcgcatgttcagaatcgcgcgtatgtctgcgtgccacggctcgaagtagacgcacacacctgtaggccgctcgccgtcgctgttaatggccatggtcatggagtctatcagcttcagaagcgccataacacccctagagcacccctctttggggggggtgttaaacctctgcagagacagcccgattccacctctgttgcatagaatgggcccggcctcttccattagagccagcatagcagagttcatgtccgtcaccctggggttcagcagataacagcttgccagggacccgcagtctctcccgccgaacaacataatgggcgtagcgggtatgaggacctgtccggccagcgccgtaaagtaggctttgaaaatatatgtccagcctacttccccgctgaccaacacgcgcgccatagccggttcctccatcgtatagtgcgtggctgttgtggcaagtcttagaaaaaattgccccatagactctatacgcccacctcgcattttggccaaatacatctcctcatactttaacgcagactgcagccccagggcgcacagctcgcggtactccgaggactcaaacgcgtggagggtccgctgaataaagtctaggtggtcgaggatgtctttctccacgatctcattcagagcgatttcggtagagtttagccaatattttaggtcctccacgttccgcgttcgaattcgcaggtgtactagctccccgcacacaacgtacagtcgctcgtctactcgacatctcggctttagagtatccaccaccctggtgatgtactccaagacctgggagcgagacgggcggggaggcagcgtggttgatagctcgttggcgtagccataatcgctgatagcatccacgcgggagataacatcttgaataattgctagcggacagtcagattgcaggaaattcaaagccatggtcccgtgtgatgtttgaaaaagtgcgctagaaacactaatacccactaagcgggagtattaggtgtgaaaaccttggggctccgcttcgccttatgtctggtcagatttctacgtaacctaccacgtagactggctttcattggccgctaaaatgacctcccattgtagcgcgcgtaatgtacaacaaccaacaccaaagagtcaggtcgtaaaatagaacatgctttattaaaagggtttagtaactgcactcgacccaatcctgtgggtcccaccgtacattttccagccaaaccacgggcatatccacgctgccaaatctctcgctacggcgtgtggttctgggggggtctgaggctatggcccccaggcgaatataggcggcatacatacacgaggttctgtttggccgaccccgcaagtctggtgcccactggtacaacgcgttggtaaattctctgttgtttagacgcgaaggcgggcaccgcggctcacaccgactgcttgacagttcctggagcgggagggcggcgtttgggtgcggctctggcgcgtccgctccctccgttcctctgatggcgctctcggtgcgggctttgtgaaacagaaagctgactgcatcctcgaaggccacctcatcaaacttgctcaccgccacgtacaccctcactccctcccggcgtaaccgctggctgtacacaaatattaggtaaacaaactttgcgctcgcgtcgcccagtttcagctcgtgatccacatccagaaacgcacacgccggcacgtaaacgctagacctgggtaccgccgagttgttggtgcgggcaccctcttgcacacccccagcaacagcggtgaggctggcgagcttgtcctgaatcacgtgggagataaggcctccaaataccgtcatgtgtttatgaggaaagacgtgggttcgcaccatcgcctgcaaatattccccaaacctgtctaggcgctgttccgttctacggtcacggtagttggctagtacgtgcgccctaacggcttccgcagcggccttgtcagagtactcccccgagcgggatgccaccaaaaacgtcaaagaaagcaacgagggtcgcagccccgtcgtatccgagcgaccggacactgacagttccgacagcgcggcccaagcctcgtccaactcctgcggattgcgcccgggtggggtgcttgatggtgacgatccaatggcatcgaggtggtggcggaggcggattatcggaagtccgggccgctctgctgtggggtcgcaaaagtcggtaagcgttacctgacgtgtaagcttcagcgatgggttaaagcttgaaagcatccacgagttttgctctgagttgatggccgccgttatcacacccgcagatgaaatctggatgccgcccatgttgctgatcgttatactattgggggtggcctggacaaatccggggagccagtccagcgtgttggggagtccaaacgctacatgtccacgtccacgtccgcgctgttgctggggaaatccagccggtggggagatctgttcccacctgacggctccatttgcgtccgtatacataatgttgctcatgccatttccgatttgcacaaatctgttgccccctagattcatcttggtctttggcccactcggtgagattcaagctacccttctgtgctgctatatctcgaaggtgagtacgtaaacagcacgtaagaaacagggacgtccacggacgtgctctgcttggggcgcgcgagagcaattgcaacaaacgcgccccaacaggctttatctactatccggcgcgcgaaaatatcatgaattgacatttaaaaataacacaactcgggtttaagcaatcagaggcgtgtctcattttggtacgccacacgccgtacgtctgaaagatatcaagccctattaaacgagcgcggttgctgcctgacactcacaaacccacgcgcggcggtgcgtctcgctactacgttctcgtgccgaaaaatcatggcgcgtgaacatgggtccatgcgagccctggtcaactctctggccgggctgctcggagaaaccgacactgaggtccccagcctcgagcctgcaatgttgatggtcctcaaatcctccatatcagagtttttcctgtccaccgacactgtgtcggtggacgaggccgcagaactattccccaggctacagtttctagcctgccgggcctacgcagcatcgcatacacccgatgcggccatgctagcagaaaacctggcaggcctcgttctgtggcgcatacaccaaaactggacggacagggaaatggaggcggtggaccagatgtttgtgctgctggaaattatgaacggcgaatcgggtgtgtacatgctgtctaataacaacctgagaatatccgccaaatacggaccctccaacatgcacctgatcgtcagcacgtggctagatacgtttcgcaatgttatgtcggttgccgctaaatcgactccggactcactcttcaactcaaaacgaatggagtctatagaagagttttctaaacctttagtccacgccaagtttaatttgatatacgacatgccgttcgtacaagagggcctgcgaatagtggctaaaaaaatcaactggattctccccttcggcctaatggtcaagggctacaaggacatgagcatggctcctctaacgcgggcgctgtttttgctgtccttggtagactcctattttcccaaaggaaccgcgaccgaaggtagcatgaaggcgttgacagcatacttccgtgaactggttagaacgatcgacaacagtgcttttgtgcctataacagaagttaacgccacgccgcggaccgcgtacgaagttagagtctcatcagctatagtacatcaaaacccatacgtaaccgacaccaaggcgggaatggtagcagagcgagtgcgaacggacgctgaaatcttaacctcgggggcgctattaagctccggggcgctctctgcccatgcgacggccgtggctaagctactctcgtccaacgaacccgacgacgtgtcgtcccgggccagggcgcgcgtggccgagcacgccagtaacacctgggagaccatccaggccagcacaacacccacacaagtcgtggaagccctagtgactgcggggtttacgtccacacactgtggaattttggagcgcgtggtggtggactattttacgcgcctgcgaagcaccgccaacagcgggccggggagaaacgactccctagactacgcgcaacaagtcgttggttgcgtggctatagtaggcggcgttgttttcaggttgctgttgtcctacggctttgggctagactacatccgggactacacgacaacgatatccacgctggagcccgtgtacaacgagctgctgtctgccctgggtctggcggacaagggagtggaacagaccctgaagcgcagcatggcaccgcgcccgtatatgaactacatctcagcggcacgcgccgcgctagacgacgagctgttaatagtcgaaaagcgcaccactgggcccggaacccatagcgccgcgagggagtccctactgacgtggttcgactttagggcccgagatcgatggggtgtgcgtataccagatagagatacgacatcgacacaggttttggccccaatcacagcatcgctttattcggacgacgacctaatagcggcggcatctaaactgtcgtttgatgcactagacgcaccccctacccaaattatagacgacccctcttttgccccctacatgctagccacggtggtgctggacgcgtttaacgccattttaacatcgcggttttccgcagactccgtgtctcaggcgctgcgcgtactctcttgggccagggactacggcgccggatccattgccaacgtggacgggtacagaactaaactaacggcgataatagcctcggtgtccccctttttgcaaaaagatgcccctaccccaaccatggcccatgccaacaacctggaggcgcttttgggagaactccactctgttgttgtggccgcgatcgcactcatcccagaacgggcgcgcatgccagtgcccgaacgaccctccgttaaaaccagtacatttttggcagggctatttttaactgctgtctacaagaggctcgagacgctagttggtcacaccgcggagctcaccaacaacatcctaggaacggcgtcggggatagtatcatccatagtcacgctcaataggttttttaactgtcgcatcatgcccgttatgggacactacgccgtattgatttacccccaatcggcccagtctgcacccttcggtaggtggcgtctagtagacgtagtagacgcggttggaagcatatacaacgaagtgagcgatctgcgcgccgacctgcgggccgacgttgtgacccttaagggcgacataacctcggcggcagaggcactgcaagagtgcgaggccctggctgtcaaaacggagggtacgcgctttggtaaactattcaactctctgctcacacgccacacgcagctggccagggcccagagggggttggcaataagggccggtaagctgctcgggggttctgaggctcccggcctgaaacacgttaatacgtttctacagcgatggggagccattagcgtcatgtaccagaaagctacatcgggatctacccccgaggtaaatattacctccctcgccaacactttgcgtcacgtgtgggacgaggtacaacaggagcgcaaagcaactcccccaagtcggaaattttccaacagagacctcgggctcgccgtagaacgcctgatgggaggctatccagaagtgttagacgacgacagtaatagcacagcgctgacaccaaaattcaacgtcgattcatggaatagcgtaaatatggacgctctacgcaagcgagttacgatgcccgctaacatcgactcgattcgcggtaatgattctctcgcgacgcgcgaatatttgaagaaagaagaccttctcgccgaaatagatgccatttttaacaatacaaagtaataaagctaattgtatgcacccagtaatacagtgtcgcgtgtacatattttccgcatgggggaggcgcacattcgcatgtgggtaaaaaaaggtgggcattcagggttactaacgttaaaagaagttgcagagcggagcgcggctcactgccctgcgcgaatcactagcgtacggtgtggattaccccaacgctctgggatatacagactacgcttttgcaggagctgttgccgatggcgcaaacccttgttccggcgaataaggcggggggcgctcaggccgatgtggtagtgataggctacagaaaccaatacgactcccaactcggcgaggggtcccacgtatcgtgcctgagatcttcgctgtcctttttgcgcctcatttttactcacggaatagactttgccctaactgccgacagtattgatggggtgctcgtcgaagggcgggcctggactgtggccggtagcaagtccggggaagcaccgtgtatggtttctatcgtggaacttccaaacaaaattacctacgccaactctgcgaacgcgctatgctgcgtgttttcgagactctacggcgacagcggattttacatgcaccctggcgatgggtttcagagcacgcaaatacccgctcgtcagtttttcgatggtgtgtggaagtcgagatctgagtcatttgctctcattacgataggggctattggtctggcggtgtatcgccacggtgatgtcgcgtatgttttcgatccgcacggccatgggagtgttaccgaggcgttcgtggttcgcgtactggcccgcgatgtttatgcttatctaacgggttacgctgccaccgatccagagtcagactgggccggcgcgcttgtattttttgttacgtgcggtcccaccgagagcgagcccggctttttgatttctgcaacgtcgctgctatacgggataagcgaaacctacctatccgacgagcaatatgtggagcggtctgtcgcgacaagccacccaggaatctctactcccccaccgctaacagatgtggctgtgggtgcggtttcggaggcgtggcagtaccaggaactcgaaaatggtgcagctacgctagatgcggacatggagggtgtggcacccgctgccgcacaagtcagggccagtgtcatcagacagccgacggaaaagcgagtgtccttgcccaagcggcgtcggcccccgtggacgcctcccaccagcagcgaaaacctaactacctcgggcaacacgcacacggtagcaggaaggccgagtcagaaggttagaaacgccactgcgaatgttcagaatcctaccaccggtaacggcagtgcttgggcggaggccttgaacgatggaggagtggataacgcgagcaggcccggacaagccgtgggtgccgctggaacactccagaaccccgctcccggagatgcgcttgccatggaaaccacacaggcgtcggaagaggctcttagaactcgcagagttttccggctctcgggggaggatgaagccccgtatgaccttggcgacgccgtgggtgttctgagcgcagagataaatgaactggctacacgagccgaagagctggatgtgctaagctctacctgcgtcgactcgacggtgtgggtcaccaggccccacaacagtcccgacatggacattctggagcagttcatcacaatgatattcaatagacttttgtcattcctggtggaaaatggcgcgcggacccgcacggactcgccttcggtcattgcgggtcttttcccaggtgtgctagcggccattcctactcaatccgcagtagtaaacctgttgcaggccaccggtatggcgcttagtgacgtggcttcctacaagtctatcctaaacatggtttcgaacgaagactcgcccgtgggagagcttgcggttatcaaactagagctcgtggcctctgaggttatcaaatctacgcagaagctcgtggccagggttgaagaattggagcgtgacgttactagcggtagcgtcaacccgttggggttgtacacatacctgaccgaaagactggtggccgaaatgaccaaacacggcggtgacctatttgcccgagaaccgaaaccgggggcagtatcactgaccgagcgcatagggtcgctcttcaggaaagcgcgcaccagggaggcgcgcgcgacgcgcacaaacgcctcattggcacgagacctcaacgctatagaagctgccgttcatgcggcccacgacaagtttgacgccatagaaatcaaacccgcagaccctagcgacaccaccaacatggacgagctagcaaagtcattggacctatcagccgtccctacccgcgtagccaaggtgatcaagaaagtggaaagtatggtgtccgactctattcgcgagtactttttgaggggggttcaatacagtgcgagggcaatagcaatggacaaaacgagcggcgccaggtttcaagtcgcttccgctgccgtatctaacctagaacgcatgctagactctttgcccaactttgagaagagtcttaactccgtagtggcctcggcgggtatccagggacctccgccggcgcaaatatccggctcgcgcaaggcgacgctactaggcaacctgttgcgagccggacagaatctgaccacggataatgctctgggggcgtgggcagcgctgctatctgaggcgcacaccgaggggcacattgaaaggcgtgagctcgaggccgtcatcaaagaaataacctccattaacgaccatgctgccaaaaaggcgtccgtcgaggccgacatggaacgctttagggttttgagcgccgcggtagaccaggccacgtccgacatgtataactctaacccacacgcactggacactattatccgtggcgcggaagaaatgattcgtcaggcaaaagtggtcgaggcgcactttgactcgggaagaatttctcgcgaagccgcgtccagagttggcgttagaaaacgcgaagtagagacgctggccaactcggcgcgacagcgtgccgccgaaattagcgccgcccgcgacgaaatttactcgcgccttcagagccttttgcttcccctcgccgggtttgttggattgcgcgccgcaccgggggttttggaacagctcgcaaaagatgctcagagatcgacctcagaggaattgagaaatttaatgcacgaggcaccgaagcaggtggtgtcaacagtacattctcatctatggtccctgttcggccagtttagagaagctctcgagcatccaaactccaccacctcatccgccctagcgggagtgggcccggcgtttgcgatcgtcgtcagaagtcttctagacccaaacaaacagcgcgagagtgtggagttttttattacacacgcggacgcgctagccgataccgtcggcgccgtcgaggcaaatccaaactccgagctggccgttgcgcatgcggttaactctatcgccgccgcaatacagacagtcagcgtcggtggccgcacaattacagagtttgcgtttttggtgcctatgctggagcgttaccagtcgagactaaccatagtcagggaaacccaaagactcgcgactgcgcagcgggcagtcgcagcgtccgtgtctgcggcggcagaagtgactacaaaacttcgtgcggtcgccgtaccgggggttcaggaggatgtgctcaaggccgcgatagccgccgccaaacacgtgtcttccgaggttactgccgccgccactgccgccgagcgggagctggcgaggctggactctaaagcattgagcgttgcccaggtggcccgcgcgcatcaggatctgcagaaacagacggctgttgccaaacagcgcgtcggcgaaatagaagaggtattggccaacctgaacaaacagcagcgcgagcttcaagatcgtgctgtgcatgataggtggaaatccgacctactggcggcgttggacaagattgaaacaaaatcatcgtttgacgtgtccgaactttctagactccgggacctcggtgctgcgcgcggctatgattctcgcgagtttgctaaacgcgcggaacaggccctggcggcaaacgcacgtgccgttatcgctgtcttggataacgtgtttaaatttaacccctacgcgcctgtgaattcgaaaaaggaaactaatcccaccatctccatgctgtataacatttcatggtgggacgactttacgctcgcggcacctatactcaataccctgtttgctggtgttgacgtcgaagagctcatgagtctgatgcgcatttcgactggcatgattacatttgccagtaccaacggcggacgcccaaaatacaacgaagccgtaaattccctgtctagcgacatgcttaaggttccgcagctagccaagtacgtagatttctacggcaagtggtacacggaattcaacgccgagatggacgtgttgagcaagctgcgggcagacgtgcttcaagcagtgggggttcgctccggggaaataagcagggccctagaagaggtcacgtacgttcggaacgcagaagtcgctgaaaaggttttggccgacggggtaaagctttacattccgagcgacgccctaatagccaaagccgtcaagtacctggaggagtttaatcagaaacggttcgcgggctccgccttcgaggaggcgatagccacgaccatccggcaggacttgtcaacggcgcgcgaggctgctactcaagccgaagccgctcggagcgaggccatgcacagggctacccatattctgcgcgaggtggtggaagccgcaaaggccgcggatcgagatgccagcgcaaatcttgcaaacctcaagaacctactaagactcaccccacccccacaaagtgtggcagccgcgctggacaaggccacctcgtcggacgacattgtgacccaagcggcgctgttgctgggcacagtggaatctacaccagagctggatattaaggccgtggagtggctccagcaggcgcggtccattattgattcccatcccctaacaactaaaatagacggcaaaggaccgatggatccgtatgccgagcgaatagagaagctacacacactacggggggagctagacgagctgaggcgtcagctcacggcgacagaagttagctgggacgaggcatgggggaatttctcccgcgccgttccgcgagctgatgtttccatggatgggttcgtggatgcccatcagagggcacgcaccctccaggcgtcgatgggggtcatttctgaaatgcgagcagataacaaatatggccgcttaccccccaaagttataggagccattgaatcaaagtttgcagagcgacacaaaaacttggaaacgtttaatgacacctcaaccgttctgcagacggccataacacagtttgattcgctcgtacaacagattcctccggagatggagtacgacgtgctacgctccctcttggcgtcgtttgaccaattggcggctgtcctacccaagtgggttggcgcagagtatgccgcgtacaggagcttgctgctgatgagaataggcctatacgacgaataccagaaaattgccggtatagccgctgcgggaagccgccctcacctggaagccgttgagtatcgcagcgccgtggaggacgccaatctaagacgcgccagtcgcgtgtcctctctcatgggggataaagatgtcatcctctcacttcgagaagcaaagtcctctatcgacaccgcgttccctcaggtgttgttggacgccaagggcgtacccgtcgagtacagagtgtgctaccgcgccgttggggacaagcttgccgccatgctatgtgggaaactaggggtcagcatgcgcccagcgatgcccagcgatcctatcgtggagtcctcttccgtgtctggtatcaatgtaactcatgacattctccagctgcggtttgggctggaaaaggcctaccactcgggattttctacgttcgcccgatttgtgcgccacaagagggcagactggagccctacagagcccgcccaggctgcggccgagatatacgcggcagtgctggctaccaccctaactcgggaatatggcgccacctggcaccgcataaggttcatggcgagttcgggcctgtttgtcgccagcccagactcagtttgcgacacgcaaggaggcagaggaaagaaaagcaacaacatagtacaccttactttatccgacgtggttctgagcgccatgttgcggaattccatgcatctagtaaactttatgcggctggacctgacacgccagcacgagtacatggccagaacaataactccagttttgacaaaatcgcttctgtctgatattttaattaacaccctcgttcctaccgacacgtcaacgcagtggagatcgctgccgctagctggcgacctagaagatttggctcaaggcatgctattttccattcgcatgtccgactggaagcaaaacagcttctctaccaccagtctgctagatgtttggatgcgctctcccggcgaaagcggacgggcggcggccgcaaagatagcctccgccattcccggaaaccccctggccacctttaccgtgctggcgcgtatgtgtatcccaccgaacgcattggcgtcgctgtgggaagcgctgcagccagaggcctttagtcagcagaatctgtcctatgatgacgtggttactagccgcctggacatcgcctctaccgtacagacttccgtggcggtggacccagaaatgaagtctgttgacactaagtctagaaagcagctatacaccactaccgggaccagcactacgttcacgttggctggctccgccccaagcgccgtcaaggaggttagcgctttggacgttgccacgtgtgcactcatgtttggggctcccgttgtgattgccatggaaacgccggaaatgttttccgaagcgtctgggatgtcgttctgtctcaaaatcttcgactccagacccggggcgaccgaccacgaaataattcaggccgtgtcctcggacctgagctcgtgggggacgtcgcttttggcactagaccccaacgccatagaaaacgcctgcctgacaacgcagctggagatactctcaggcttggtggcatcaaagcttttagctccagcgccgccgtgtcttatagtgctcgaccccagcatgagagtgataaaagtgttgtgggaatctgaatcccccccgaatgatctagttatcactctggccgaagatgagattatagctgagcttccgtacttaaacgcggatgatgatctgctacctccaatgaacccggatgaccctatctacaccagggttataagcggaacaaacattccgacggcgaccacggaaggcagcttatttgccgaccagcagctcgagtttttacgtccggagtcaaacccgtttccgttcgcctcacacgacagttcacagtctttagatgtccccagttctccgagtagcggctccgacaaatatgaggaggacccaacggggatagtgtatgacgcgcctgtggacgatatgtcagacatggcaatgaacaaagcaaaggcgtggcaagagtggttggaggatgggttcgcggaagatgactaccgagaactatccaacgccatgccggcgcctcccaaaactactccggtcgttgagtccaaacagaagtctgattctgtcgacagagcacccacactaccgcctaaggctgctccccttccgccatctgatgcatccgccatcatgtccggaaagcccgtgttcaagtatactccgggcaacaagtctgccgttccaccttccgtacctgctcctcccactcttccacccgctccccctctgccccaatccacttcaaaggccgccagcggccctcctcccactcttccacccgctccccctctgccccaatccacttcaaaggccgccagcagcgccacacaatcggacagtggcaaaactctcaccctcgatgttccaaaaacacagtcgaaagataaggtggtaccagttccacccaccgataagccgtcaaccaccactcccgcggcactcaaacaatcagatgcaagtaaacctcctactgctgcaattcaacatcagcaaaaattaggtacacctgtcactccaaaagattctggagataaaccaaccgataacgcaagcgcgcctgttggtgtatctccagtaactcccgatggaacacccggagccaaaccacccccaaaagacgcaccccctgtggatgacactaaacaacctgtgaggaaatcgcttccatcacaggtgcgcggcgggcgtccgtacatacgcccgtctctaggaccatttaagtttacgggtccgcctggttatacgattccagttcatggacttccacctagtgactcaaacgtgacccaatcaaccaaggagcccccaaagcctgccgtagagacccccgccgcggccccggccaaatctgcggcggcccccgccgcggccccggccaaatctgcggcggcccccgccgcggccccggccaaatctgcggcggcccccgccgcggccccggccaaatctgcggcggcccccgccgcggccccggccaaatctgcggcggcccccgccgcggccccggccaaagaccaaacaaaatcagctgctgaagtcccaaagccggccaaggaccaggccaaggaccaggccaaggaccaggccaaggaccaggccaaggaccaggccaaggaccaggccaaggaccaggccaaggaccaggccaagtcaacaacaggccaaaagctggctaaggaccctaaatctgatgggctcacagacgatgttgctttagagattgtgcccgaaaaaacccctttgccggatgactcgcccattggggcggttcccaaaaacactcccctaccagatgactcgcccactggggcggttcccgaaaacactcccctaccagatgactctcccattggaagtccagatttgtcagcatctaaaaactcgcataccactgacgcagtcagcagtgaccgtttttctgttgcctgcaaagtaccgctcccagattcgccggaagatgacttctactcgtatgccgttgacgtcccattgcccgattctcccaccgacgacccctcaagcggccgttctgatgcacgagcaccaaccgtcggaggtgttgccagcattcatcgtaagagcgactccagaaacaaccgacaatcagacgcatggagacgtgcctttgctgacacgctacatgggcgtccaagaaatagaagcgctactaaaccatgtaaatcagcaccgtataaagttcctcacgccatttcctatacgaaaataccttcggtacctaacgatcaaagcggtcttgcgggaaaaccctgcagcgaggaaccgaaacgtccgactggacgagacacccctgtcggttcatggaatgtttcgccctcgcaggcgcccgcggacattccggccgccattccgcaaaatcagaatacttcagagagtccacgtacgacctcgctgaagtctcctactcgcacggtgcaatctagtatgccggcagatgatattgatgaactcgccgagtacgatcttcagattgcccgtgccgttcctgttactaaacatcctcagccgccaccggcaaaccagacgccaccgcctcaagaacccccagcacctattgacgatagaaagaacatacgcccaccgctaagcgaggaggagattatagccttcctaatcaatatggacgacgacgacgccggtaacgcgtctggcccggttgacttacactcggtacaagcgcccaaacttcccaaacaatcaaaacctacaaccaaccagtttgtaccgctggattggtggactgaaacggaacccgttgtggacgccgacagtctggacctgtcccccaaacagcagcgtctgttttcctgggagtctacgcgtgacctgttaaacattaacgtgagggacagagtatacgaagaggagtcggacgatgagtataccgtttcatgggaccaacacttagtcccggccgtttctcccacgtctgtatcatcctacagtagcgataccgtcactgatagctatacagacataaacgatcccaggagtgttgtgtgccccttagacggaaacgcccaaaacaacgtccgcgagtttctagacacgcatagttctagagttcgcgtggttcctgctgacgaattgctaagtcggcggtactttcggtccacgagtctgagtgccatggcgttactcattgctgcgtgtcgcaccatcgtccgacgacttcgggcaactagacgagttcttacagacatcaaccggagcttgctcttagacttaaaacaaatacgggtcctcttggggtagtgtatctgtttttcaataaacaccattggaacatgaactttgtctgtaaaccgtttttattgttggggaattacatagccgggggtgcaagggaaaggtcagtcttccgaaatgggctgcatgaaccgaggtgggaaggtgcgcttgagtcctatatttgggcgcgcccaggtagatgcgtcgttctgcgcgaacatatcagatcgtcgaacgagggatttcaggtggcgttgtcgtaggctaaccatggtcctggcggttcccataaacagctgctttagcccttcgctaatttcatcctcagtgtatttggtgtaatccagttcatcgatgttctggtttaggatagttatcacatcaacgggcagcatgtctttgaagttagccgctttgatgttaggcgggtccgctgggttgaacgccaccggcgcctgctgttgctgtttgtcggcagccatggctaaatgtttgctgcgagcgcgcaacgcacccttacgctggccggtgtagcgacaaatagcgcagtttcgagtagtcgccggctttttattagaagaggcgcccctttgtcgctattgcgagtattacagcaacaaaaacaaacgctaagatcgcggccgcgatcctcacagggcggcgtttcacccgctccgaggcgaacgcgctggagatgctggcgaggctggcaaaaacctctgaagcgcaccgcttgggcgtgggacgccgcttctgccgttccctacactcgcgatgctccctgggggagactataccgttactgcgatcgcacgagtctacggtgcgcttttggtgcaactccatcgcaccaaaactagtcgcgcgctctagcagccgctgggttctagacgcgtcttccggacccatgaaccgaaacgacagctgcacgacgggcattctagtgaaacagcttatttgcatcatcgcctgcaggggcctcaggtctaggcctccccctcgtttcactcgttctatgccagacagggccagcccggtcgtgtgcgttgatttgaggatcacgttgttatgctcagacgtgattgaagccatgggggcgttggggggtgcgaaaaaaaagccctgaaatagcactgacactcccgtgttttgaatgcgaatgtacggatcgcactgactacgagcccagttcttcatcaaccggagcacatactctataggaaatgttacgctgttattatccggcccgctaaattgaaacacgcacctggctggtaggtgtttgggatcgttcagggttgcatcgctctctccgcagtgcagacttcccgagacaaccagacggatgcgctgtaacaaaccaccaccgactgcaaaatctctatagttgtacgagtccatggttgtagcgaaatgtccccaacagcggccagtcaacccccttaagcgactgatgcgtggggcatgccgccgctcaaacttaaaccctcgctgtatgtagccactccccacgacatgtctcgcactcggtgcagcagtttaggcgtcatgtagaatttggtgtaaatctagaaacttgttaattattgtcgcaaatctttccttgcgggcgtctagggcagaggtgtgatcacaagccccaccgggcatacggttgtccggggaatgaaacactgaagaggccaggcgccgcgtgaatgataaatagtttagtttggcgtctgtcgtgggcatcaacagttccatctcagggggcatcaggtcttcgaaccagacactaaagtcgtggtgtccgtaggcatcatctagggcgtttaagctcatcgattctacgtcgctgctcggaatcaagtctctgagccttttcggagacgcctggcgcgagcgtgcttgttgcataccgcttaaggcagcatcagaggcgttttgctccatggcggccagctgcaatctagacgtcataggcgaagacgggggatgtgcccttaccggaggctggcagccgggtgcgttcgagcgcccgtacatgggatttgacgccagacttctatcaactaacagcagtctgtgcagcgagttaatattttccgcgcacttaatgcagatttcacctacgccccagcctcgagagcaagtcgatgtgtgcgaagacccagacaacgatccgcccgaacctagctgcgcccagtttgtagatgcagtggccgactccctggctctcgacaaactctgtttgatctgccggacaatcgatttgtacagacgccaatttgggctttccccacagtggatagcagattatgcgatgctgtgtactaagacgttggcggccccgccatgtgcagtcgccactgtggttgccgcattcgagttcgtgtatctaatggataaacactaccttcggcgcggaaagactaccctagtgggcgccttcgcacgtagagttttaacgctcgtcgatatacagcgccacttttttttacacgtctgctttcgcacggacggcggggttccccgctgcgccgcgtccgggacggccccggcggcaacggccatggccggcctcggtatggcggacaaagttcaatattcaaattactcgtttttagtgcaatcgtccacgagagccatgttactgactgtggccgacgttccatctggagacgacggcgcgttacaggctgtgccccacggcagacatggagcgggcaggccggcggatgggggcggtggggtgtttggccccaaacaacaatctaccgtggccgcgctgatgagttggaaggagtgtgcaaaaatgatagactgttctgggtctgagcggagacgccccggcgcgactatgacatgctgcgagcgggctcgggccgatgatgatgaatacgaacgccagctgttatctaccgagaacacatatctgggctcggccgacaatcaagcagaggggggtaacgacacacatctcaagtggggctacgcagacctcaccctgctgctgttgagtcagtccagcacctgggaggccagcgaaaaaacatccctggcgagtcagtcgcgcagggcctgcgtggaggagtattgggcctcccacaggaccgtgctggcacgagacaccgctcctaggtttgccagattcgtggatgcagacgccgttccggacacggccacggggccggttttagcgactaccctcaagcacgtacgcagccgcggaagaacctgcgccgaatgcgtgctatgtaacctgatactaacgcgcgaacactggctcgcgctacgccgctttaagcgagatgttatatcgtactcatctaacaacgcaaacctgtttgattgtatctccccagtactgtcggccctttctgacgcaaatagcgagccgctcgccggcgactgcggcgtgggtggcggcgggacctgcccagaagactcgggcaggtttctagagctaatgcatgccgccggcacagaggccatatacaagcacctgttttgcgaccccatgtgcgcgttggtggagctgcagacaaacccgagtgtccttttttctcccataggcccccctccagaaccagacgagatagagcttcaaaaagcgcgcctcgctagcgaaaattggtttagtgggcgtgtatgtgctgggttgtgggcgctggctttcacttttaagacgtatcagatctttacacccaaaccgaccgcgtgcgcggcgtttattaaggacgcgggactgctgcttaggcgccacaacctcccgctcatatctctcgaacacacgctctgcaactatgtttgacggccgcagcgatatctacgactctaagagctttgccgcagaattagacgatctatactcttgtaggtcaacgggccgcgaaaatggccgtaggagccgtgtcagcactcggggcgttcatcgcgatcgatgtggatcggccgccaagagacgaagcaccaagcgacggtgcgagttagtcgccagggaaagggaccgatacagcctttacctagattacatggccagccacccatcggatgaaatttcagccgtacgcgagctcgtggttcccctaattaaaaccacatcgattacattaccgtttgatttaaatcaaaccgttgctgacaactgtctctcgctatccggtatgggctactatcttggtataggcggctgttgcccaacctgcaccgtttccggcgagcctcgcctccatcgcgcagaccgcgccgcgctaattttggcctatgtccagcagctcaacaacatttacgaatatagggggtttctggcatccgtgctggcggcagccgcccagggggaccaggccggcgttgccgcctcagagggcgttcaggcggagcgcttgctggaaaacgttttggcccagccagagctctttttcgcgtaccacgttctcagggacgggggcatccagaacgtgcgagtgctgttttaccgcgacctgagcgtatctggatatatgatgtacgcggtatttcctaccaaatctgttcaccttcactaccgtctcatcgatcgcctactggccgcctgccctgggtacaaaatcatagcacacgtctggcagactgctttcgtgctggtagttcggcgcgacgaggggcaacaaacagacatggatataccaacggttagtgctggagacatttattgtaaaatgtgcgatctcagctttgatggggagctgcttctagagtacaaaaaactgtatgcagtattcgacgactttcttcctccggtgtaaagggcgtcagcttttcaaagccggcgcgctcaagcagtgcctgggttttcgtgggggtcttgtggggggtttccggaataaaccgctttaaaagattttctgttgttctcacatcatttccgaatagagccttaaaggtcacgcttatggtacccaacaggtgggagaaatagtagtctgtgtttagcggtacgtcattctcggaaacataggtcgggtcttcggcgaggtcggaaaccagcagtttgcgtttaggttgggggcgtgcggtcttggttaccacggggttttgggcggtaccgcgcattgagtttactacacccgcttcgcgttccgcggcctcggtctgcgcaactatcacatacggaattctctcttttacgctgggcagttcttcattcctcatggcgagcttaaagtagacggtgaggtgcggcaggcgcttgttggtatacgattcgggtgagcggctcagctcagcagtcataacgaactcgcgcacgtccaagttgggggcagtgatacggttgtacgcctctaccagcactcgcccaaacttgtcaaagccgctcggtagcgggcgccccacccattctgcgggaggcacgtctgtcacctttgctgccgccgtggccacatcctcgtcgtacaacaaaagatctaccagatgtcgcgcgtacaagtttatgaaagagcagttatttttgcggaccaggtcgacccccttcatgagcatcttccccccgtttatgacacctatgtacttcttcttggtgatcagcagcagtcgctgaaaggtcttctcacactccagtttgatgggcgctctaaagaggtccgctgaaatctgacgcgacatagcatcccccagctccgataccccctcgtacgtcaggcccacaaacttgataaacacggagtcggtgtctccgtagataaccctgacggagtaaggcttgtggtttcggaaacctatagcccctggaaaattgtcctccagcagctcgcgcgtcgcccaacgagagtgaacgtaatctcgggtcttgaggagcatgtcgcgtcctatcgtggtaacggtagccgctatcctcagacacggcaacaggccgtttgccacccccgtgaatccgtaaaccgagttgcatatcaccttaatcgcagactgctgcttatctagtaaaactgcctcctcgggggtgctggtggggattcgcgccctcaccgcctttcgcatggccagccagtcgcgcagcaagatgccaagcaggctttcgcgaatatgggcgtggacaaaaaataacttttggtcacccacctcgaacgtcgagtagttgacggatggttgaagcccggccagatccacttcatcgagcgccagggtggtgaaacagaggttatgggcctggataatgcttgggtataagctagcgaagtcaaacacaaccacggggtccacatgaaagccggatacggggtctagaacctttgctccctggtagcccacggccctcccgacgccgggcttcccgcctccgttttcagaagtagcgccagatcctgcggcgtccggggtaccgtccacaccgtcgggttcgtctgtactgtcgaaggcgtggctttggctatccatagccaactccgaagtctctgacgcggcgtctgcctgactgtcaaaccggcgtctgttgtctggcaaaatgaaatttctctcgcgggcgagtttcagcaagcacgtgtacacgcgaatttgctgaccgtcaaaaattacccgcgttagggtgatacgggcgagtttggccaccgccgatagttccagatgggggaggtacttaaaaaacagcttgcccaccagcctagagtcctggatacaatactctcctattacgcccctccggtcaggccctcccgcgtaataggagggtatttctttatagggaaggtctatcttatgctcgccgaggacgtctcccacgaccgcgtcgagtttgtagctgggtagctttagcttttccgtcgccacagaatacatgtctagagatatcaggccattgattttcaccttgctcttcttctgaaaatggttcgtggcgatgtcccacaccttaaacagcccccctttgttgaacttgccgtacccgtccagcttgatgttatacaccgacgttaccttgttaactatgtacgcccagtcaaaattaacgatgttgtagccggtggcgaactcgggagagtactgcttgagaaaggtcaggaaggcaaccagcagctcgtactcgctgtcaaactccaaaaccgtcggtctgggctcgccgcgctggacgcatgcaaacgagtattcctcagagatatcgcatgacccgagggaaaacagcagggtgtgttcgtggttctgagtagcaagcgagtacagcagacaggagatctggatgaccaggtcctcttggttagttgccactgggaacgccatttcgttacccgttccagctttacactctatatcaaagcacatgagcttatagtcgggccaggcagcctcgtctggtatcggctccaggttatcgggagtacagttaatctccacgtcgcttgaggtgacgtgtcgctcaacggggcgaagttgaacacgctctccgtgggtgccgggtcgcaggcggtaccacccaaaactggtaaaattttcattgtccaacaacagccgcgtggtcacgtccacgctcccctcgaattttgtaatctccgggtgaaagttgtcgcagatgaaccctcccaggcggctgctggaggcagatactctatagtagagagctggcttagatccaaagtagtacagcgtcgtgtggcacacggtctccactttgaagcagtccgcagacacgtgctttccgccccaccatcccccgccgctgccgccgctctgtttgccgccgttgccatttcccagggccgcgctcaaagccgagctgtgcgcgcagtccaccattgcgcgcacgagttctgcctcggtggttattccacaagcgctatccacctccgcctttgccatgtaaaaataatggcgcacaccatagacgtgaaccgcgactcgctttccacactcgctcattcccagcagtgttaccacagacccgcttgggcgggatagctcagcaaacctggatgggtcatcgtgtgaggcgctctccgaagtctctactatgtcgtacacgtgaaatctctcaaatctggggttgaatccatcgccccgaaaatcctggccgttccaaacccgaatcctgcgaggccagcaacctccggaggcaaagttcagcacgtcgtactctgagccatcgcagtacactttgggtgggcgctccaaggtgcccacgtgtacaccgcgtcgctggtcggcgggggcttcttcatcgaggcatcttggagctataaacttaaagctacccacctctgtgcagtacgagtgttgggggggccttgggcgctctgtctccgcggtctgcccgcttcccggcctgaaaaatggcctcttgccaataaacggattaaaaaacccgctcctgcgaacggagttggcctgttcgcgcgccgccatgtctgtgtaaatttaaagtgcgaatggtttccttttttataatatatgggtcactccaccccctggtctcgtgatgtgtggtttactgggcgtgtttagatttagctttaaagtctgcccgccaaccttgcttaaacgcttcgagtaaatctcgttaggaagctcctagctatctttttaacaaggacccctacagcagcgctctcaaccatctacatctaaccatcttggtcttacctgagctcccgggccgagtttcataaacaccatggagtctgcgcccaagacagtgagcctaccggtgtcgcccctggggtatgtctacgcccgccagaaagcgtctctgcagacgggcacggttagtctcacggccgcccggagcgtcgattcggacctcgcggtactgcctgtgatccgcggacttaccgtcgaacagaccttcacaactaacgtcgccgtggttgccgggtcgaaaactaccggactgggtggtactgggattactctaaaactcacacccagtcactttaaccccagcgcctttgtgttttatggaggctcggtcatcggagccagctctaatgcccccaacctcacccgcgcttgcgaggctgcgagacggaggtttggcttttctgcattctcctcgccacccgttgagaacgccgtggaaacctccggggaagaaatatgcgcttctctcaacctgtctccggagaccaccgcgctgtacctggtggtaaccgaaagtttcaaagagatggtgtacgtgtgcaacaccttcctccactacggcggaaccagcacagttaccatcgatggacaagatgccatgaagattccaatctatccggtacagctgtatatgccggatgtcaacagactggcgtcagagccgtttaacgctaaacatcggtccatcggcgacgagttcgtgtactctaggccgtttttcaactcggacctctgtaggctgcttcatggctacgtactgggtccggcggctgtggcacttcgcgtcagaaaccttgacggcgttgccagaggagcggcccacctggccttggatgaaaaccacgagggctctgtgttgccacaggatgtaacctttacgctgtttgactccacccagggaaacgccggcaagggttcgggacgcgctcagcgccaaggggatggcagcggatcgaaaaacagcgcctctagcggtatagagcgacggctagcctcggtcatggctgccgacacagccctctctgttgactccataatgggagcggggatatacgacacggagctaccgtctgtagaagattggccagtgttgtcttccggagacgatacagagagtctcgaggccctcggcgcgtacgcggctagactgtctggactggtaggagccatggtgtttagcgccaactctgtgttgtacatgacagaggttgacgacgggggcccggcagacggcaaggatggatcaaatccttcctaccaccgcttctacctaatagccgccccctacgtcgcggggaacccacagacggacaaagatggacgcgttttaccgcacacggcagaccaacaggctgcgcccatcaatggctccaaccaagagttttccctggactatctagccctggcctgcgggttttgcccccagatactggcgaggcttttgttttacctggagcgatgtgacgctggcacctttgggggtcgcaacgagacggacgcgctgcgctacctggctaacacgctagaatctgatgttccttgcgggttgtgtaaccaggccactcggcctgcatgcgcccacaccacgcttcatcgtttgcgtcagcgcctgccacgttttggggcaccggttcgagctccgataggaatatttggtacgatgaacagcgcgtatagtgactgtgacgtgctgggtaactacgcttcctacggagccctgaagcggcccaatgacaacgaggcaccaaagagcatcatgcaggatacctatcgggccacgatggagcgcctggtcaacgaattggaacaagccaaactcattgacaaggaaacgctcgcgcaagccagcccctgctcagcccccaccagcgtagtgcatgatcaagctagcttcataggactcctgtcaaacatcaaagacaccatcgagggtgcagcagaacagtttatgcgcactctggttgaggcgcgtgatttcaaaatccgcgagggcctggccgacgcgaaccacaccatgtctatctccctggacccgtactctagcagcttttgtccggtcacatcatttcttgcccgccgcacagtttttgctgtcttacaggacctcgtgttgagccagtgccactgtctgttctacggccaatctgtggaggggcgcaactttcgcaaccagtttcagccagtgctcagacgcagatttttggatatgctcaacgggggctttatcacagccaagaccgtcaccgtgacggtttctgactctggagttttggcaccagacctcacacgtcccgcctctgagccgcccaccaaggactacgacggggacatggccagagtcagcatggaggtgctgcgagaccttcgagttaaaaacagggtgctgttttctaacggaggggccaacatgtctgaagcggccagagccagggtggccggcatggccagcgcctatcgcaggccagataagggttctaacatcttgaatggcgccgtcgggtttctcgtcaagcagtatcacggagtcctctttccccggggacacccccccggcatcgacactccaaacccccagtggttctggaccctgctccagcgcaaccagatgccggcgcgtctgttgagcaaggaggacatagaaacgatcactgccatcaagcggttttctgacgagtattccgccataaactttattaacctgacaccaaacaacatcggggagctggcccagttctactttgccaacctggtgctcaaatactgcgaccattcccagtactttatcaacggcctcacggccatagtcgttggctctagacggcctcgcgaccctgctgcggtgctggcctggatcgaccgtacaatcaacggcgcggcagatgtagagccggctgcccaggaggtgctgcagcggctcgggtctaacccggccgcgtggacgggcacgtttacgtccaccaacatggtccgctatgtcatggaccagcgccccatggtcgttattgggttgagcatcagtaagtataacgggagcgcaggaaacaatcgcgtgtttcaggcaggcaactggaacggtctcaacggtggcaaaaacgtctgcccgcttatggcgtttgacagaacccgccgttttgtgttggcgtgcccgagggtagggtttacctgcgaggccgggggatttggcacgggggttagagagaacacgctaagcgagcaggtcagaggaatagtctccgaaggaggaccgatggttcagaccgcggtgtttgcggcagtcctgcacgctttgggagcccgcacgcagcacctggccgtagatgattggatcggtctggtagacgacgagtttttggcggcgagtctggatgccctgaatgccaccgtcgttgatcaatttggagagtggagcgtggaggctgcccaggagctggtgaaaaacatggaggcgcaaacaaccgccggagcggtagctgccggcgagggagcgtttgacttcggggcatgcgtgggtgatactccacaacaatccacttcagcatttaacggtggcctggccatggcagctgcccctgctggacaaaaacggtccctaccggatgatatcctgtttgacatgggtgcccccccggagaaaaagtcggggctcacctttgacatgctctaaggctacagatgattactactacccccctcccccgttgtgtttgtatcttaactcatctctattggtccaatttggagttcaataaacgttttacattttatattcggttgactcgtgttatatttcactatttctgacacccaccacgcctctatcagctatggagcaagacgatgcacccgctgccatgggtagcgcacaggcccgtcagcgtttactcgcaatctttggtcaggtgcaggcctacatatttcaggtggaaatgttaaagcgatgcgacccattggcgctgctacctctggtagggtcgctaaaactaaacgccttaacgatacgcatgcttagacgcaagctggggggagctctcatcgaacaggcgcagcatcagcaaacaccactcgcatgcgccctgaccatggccctagaatacgccgaggttgaaggcgaacgtgttctgcgtgcggtggatgacgtgaatctggctgggccagaggggtttttcagagccacgatgcggctagacgaaccgtgcgaataccacgtgcgggtgcacctggatacctacggaggccccatagacgcggaagttcagtttttacacgacgcggaaaacttcctaaagcagttaaactattgccacctgatcacggggttcgaggccggcctcgatgcattggaaagcgtggctcgctttcttacccgcactgtgggcagcggcatagtggtacccccggagctgtgtgaccccacccatccctgctccgtctgttttgaggagctttgcgtaaccgctaaccagggggaagcagttcatcgcagactgctcgagtgtacgtgcgatcacatcactcggcaaatggctgtcagggtcgcaaatattgacattgcgcggcacctaccgcacgcgctcagtgtagcctccgagcggcgcgcggcggcggaagcggctctcagggccctcgaggccaggcgcgtgcaaggacacaacggcaagagcgccggcacggaggacccgacgcaacaagttgcgtcgcggctgctggagtcccaccacgtcttcaagcctgcctcgcggtgcctgtacgccgtgagcgagttaaagttttggctcgcgtctaccaaacacggtgatatgggacagccaagggctatagacacgtttacagaaaacctggagactctggacaagcaggaaaagttttttcacctgcaagccgcaaccgttgaattggcactattcggacgcaccctagaccactttgacagactgtttgcagaccagctgctcggtctggacgtgatcgatggaatgttggtggggagctgtgcggtgtcaccggacgatcacatagaagccctgataaaagcgtgttatactcatcacatgtctgcgccgctcctgcagaggctcacggacccagacaccagcaacagagaggccctcaagcagctgctgggtcgcataggggtggataccgacgacggggccggcgagttgggggacgccttagacgtggatttggataatctaggtggggcccctcctgtcaacagcaccccctgtggtgaggacgccctctgtcgaaccgtttccgaggaacgcccgtgggacaaacttttagagcgggcgactgcggatgcttcgcagcgcaggcgcatgtacgcggagcgtctgtcaaagcgttccatcgccagtttggggcgctgcgtgcgcgaacagcgaagagaactagaaaaaaccctgagagttaacgtgtatggcgaagtgctgctacatacgtacgtatcgtcctacaacgggttttgcgccaggcgcgggttttgcgcggcggtgagtcgagcgggtaccatcatagataaccgctctagcacgtccgcgttcgactcgcatcagttcatgaaggcggcgctgcttcgccaccccatcgaccagtcgctcatgccgtccataacacacaagtttttcgagctgatcaacgggcccgtgtttgacaacgctggccacaactttgcgcagccgccaaacacggcattatattacagcgttgaaaacgttgggttgttaccgcatctcaaggaggaactagctcggtttatgattactgcggctaaaggtgattggtcaattagcgagtttcaaaggttttattgctttgagggagtgacaggtgtgacggccacgcagcggctggcgtggaaatatatcggggagctcatcctagccgccgcagtattctcctcggttttccactgtggagaggtgcgcctcctgcgcgcagatcgtacctacccggactccagcggcgcacagcgctgcgtgagcggcatttacataacctacgaggcgtcatgtcctctggttgccgttctgtcggcggctccacatggggccattggcgcggagacggtggtgatttacgacagcgacgtgttctctctcctgtatgcagtgctccagcagctggctcctggatcgggagccaactaggcaatgttggaaacttactcgccaccccccacccgctgggaaagccggcatcatcgagggtgggcacaatagttctagcctgtttgttgctttttggaagctgtgttgttagagccgtacccaccacgccaagccccccaactagtactcccacttccatgtcaacgcactcccatgggacagtagaccctacgctgctccccacagaaacgcccgacccactcagactggctgtgcgcgagtccggtatactcgctgaggatggagacttttacacctgcccaccgcctaccggatccaccgtcgtacgcatcgaaccacctagaacttgccccaagtttgaccttgggagaaacttcacggaggggattgctgttatttttaaggaaaacatcgctccctacaaattcagggcaaacgtatactacaaggacatcgttgtaacacgtgtgtggaaaggatacagccatacgtccctgtccgacagatacaatgacagggttccggtttcggtggaggagatcttcggtctcatcgacagtaagggaaaatgttcgtcaaaggccgagtacctcagagataacatcatgcaccacgcgtaccacgacgacgaggacgaggtggagcttgatttggtgccgtccaagtttgcaactccgggggccagagcctggcagaccaccaacgatactacgtcttacgtggggtggatgccatggaggcactacacgtcaacgtctgtcaactgcatcgtcgaggaggtggaggcgcggtccgtctacccctacgactccttcgccctgtccaccggtgatattgtgtacgcgtctccgttttacggcctgagggctgccgctcgcatagagcacaatagctacgcgcaggagcgtttcaggcaagttgaagggtacaggccccgcgacttagacagtaaactacaagccgaagagccggttaccaaaaattttatcactaccccgcatgtcaccgtcagctggaactggaccgagaagaaagtcgaggcgtgtacgctgaccaaatggaaagaggtcgacgaactcgtcagggacgagttccgcgggtcctacagatttactattcgatccatctcgtctacgtttatcagtaacactactcaatttaagttggaaagtgccccccttactgaatgtgtatccaaagaagcaaaggaagccatagactcaatatacaaaaagcagtacgagtctacgcacgtctttagcggtgatgtggaatattacctggcacgcggggggttcttaattgcattcagacctatgctctccaacgaactcgccaggctgtacctgaacgagcttgtgagatctaaccgcacctacgacctaaaaaatctattgaaccccaatgcaaacaataacaataacaccacgcgaagacgcaggtctctcctgtcagtaccagaacctcagccaacccaagatggtgtgcatagagaacaaattctacatcgcttgcacaaacgagcagtggaggcaacggcaggtaccgattcttccaacgtcaccgccaaacagctggagctcatcaaaaccacgtcgtctatcgagtttgccatgctacagtttgcatacgatcacatccaatcccacgtcaatgaaatgctaagtagaatagcaactgcgtggtgtaccctccaaaacaaagagcggaccctatggaacgaaatggtgaagattaacccgagcgccatagtctccgcaacccttgacgagcgagttgcagcgagggtcctgggggacgtgatagctataacgcactgcgccaaaatagagggcaacgtgtacttgcaaaactccatgcgctcgatggacagtaacacgtgctactcccgcccccccgtaacatttacaattactaagaatgcaaacaacagagggtcgatagaaggccagctgggagaggagaacgagattttcacggagcgcaagctgatcgagccgtgcgccctcaatcagaagcgctactttaagtttggcaaagagtacgtttactacgagaactacacgttcgtccgcaaagtgccccccacggaaatcgaggttatcagcacgtacgttgaactaaacttgacccttttggaagaccgcgagtttctgcccctggaggtgtacacgcgggctgagctggaggacaccggcctgctagactacagcgaaatacagcgccgcaaccagctccacgctctcaggttttacgacatcgacagcgtggtcaacgtggacaataccgcagtgattatgcaggggatcgccagctttttcaagggcctgggtaaagtgggggaggccgtgggaacgctcgttctcggcgccgccggcgctgttgtttcaaccgtatctggaatagcttcgtttttaaacaacccatttggggggctagccatcggcctgctggtaatcgccggcctggtagctgcgttttttgcttacagatatgtaatgcagatccgcagtaaccccatgaaagctctataccccataacaacaaaggccttgaaaaacaaagccaaaacttcctacggccagaacgaggaggacgatgggagcgactttgatgaggccaagcttgaagaggctcgcgaaatgatcaaatacatgtctatggtttcggccctggaaaagcaggaaaagaaagctataaagaaaaacagtggggttggcctgatcgccagtaacgtctcaaagctggccctgcgaaggcgcggtcccaaatatacccgactccaacagaacgataccatggaagatgaaaaaatggtttaaacatgtttaataaatattatgacacgtactcaaagtgtgacctcatatttgcataaccactttctagttccggccccaaggatatttaagcctagtatctccgccgaggtttcatcctcattcaccaactcacacttagagttgacgcttcctcttgcgcctttgctctcgccgctcctgtgttagcgtatactgcccaagaaatggattctccacgcggtatctccacagctaccggtgatgcccacgccgaggccgcggtttccccagccgcggaaatccagataaaaacggaagcccccgatgtagacggaccagaagccactactgagtgtttagaccacacctacacccaacagacaagcgggggtgatggcctagatgctatcgatacggacggtctgctggagatggtgctgacttccgaaaacacagagagcgaacccggtattccgtttgccctgcggggaaacttcatctgctgtcgagacgacaactgtcgcgcctgccgggagctgccattccgtccatctgtgatcgggttttcgagggacccccacgtttctatggcgcttgacatgaccagcggcaactgggcttacgtcccacgtgtttttcccgacacgcccaccgccccgtggatggccaactactgcatccctgacctcgacgaacacgcggattgataaaaaagcaaaaaataaacaatttttagtttatatacgtgtatgtatttattgttagtttacaaagtagggggagggggcctttatccagtttaccgagcgctcatcatctgagacacgaatatgtccgcgtcatcgcgcccaaactccaggccggtggacgcactggcgtcgaccgtctgactgctagcctggggttgagtgacgggcaggaccgccgctgacgtaaccgcctcaaactgctggggtgcagctctagcctgctcggcctgctgcggggcggtagaagcggctacgaccttggcactgcccggggcttccccggctggcacctgtggcgccaacactgcttgggttggctgagaggggattcccggtagctgcggagcgacgatggcggaaaccgcgtgctgcggttggatatactgatattggctgtattgaggaggaacggctggtatgggtttgtatagccccgccggtgcggcttggggctgcgcggtcacggtttgtatagctctgagctgcgacacctcttgctgcagagaggaaaccgcccccattagatccgcgatggtggtggacgggcgcccggctctgcgctcgcctgggcgcggtgagcgctctccggggtaatagataccctctaggtcatcgcgtgtggttgcgtcccagtcatggcggcgcttgcgtgcatatcgccgctcttgctgcggagacagaggcggtgagcactgtgagccttgaataacatgggggtcgctacccttggtagcttttcggtccgcggccagggctccgactagcgctgtgatctgcgcctctaggttagcactgtgtggcacgctccagtatggaggtgcctggtacatcgatggtggcatcagggaattgtaagccggcggtatatactgagaaggcaccgcgtgagtgacgggagccgggccagcgtttattggaggatgagaagtgtgttggccaacaacgagctggttatactgcgccgcggggactaaaatgtagtcccctgaaaccagaggggcgccagccgccgacagtgtctgggggtttgacgaggccatcgcacttatatgtttttgtgtgcgttcgcctatcccacccttgtcgttgtctgatgagggtaacgcgttggggcttgaggaagtgaaagcctttgcgccgagcgttacgcgtgaataaggtgcgccgtgaaccttttctccgcttttataaccgcatgtgtctaccagctccgccccgcaaaagtcggctttgttgcagccgttggtgatcccgaagctcgcgctggcctgcaggtacgtgtgcccctctatgccagcctctctccgtcgtcgcgccaccaggttccagcggtttcgtaggagcatgttgttaacggcggttgacagtaagacccgggtcagggtgtcctctgataggtgccacgtggccgcgtcccccaagcgcgattgtgcctcgcgtgccgttattaacaattcctcgcgtgaggacggcgacagcctcttgaatggcgccaccgcattttccggggtggcgtcgtaagtgacgattgttcccactctacggccgattacgcacagggagacgtgcgcaaatagggtttcgtcaggctcctcgtccggcccaaggcgccgggaagacagcgacgctgacggcaaatagttgctcacgaggtacagcagccgctcctgctcagacagcccttcggatagctccccgaaaaagtcggggcccgcagccgtggctaaaaccgcacccagctgggggcagttaataattcccagaaaaaacgggcctcgtgcgtcatccactatggataacacctccccaaccacacacccgttgcggtggtcgatgttaatgggtaatctagatgccgggggaagcgctgccgcgacggtttccctggtaagcgttagctcccccccatcacccatatcatagagagctatatacccagccacgtagataggaaggcttactgcgttaccgtccacggtgtacgcgtccatagtaagatatgcgtgggtttattccgagtaaaacacaccagttccccgcgcgcgcggctaataaacaatcttgttcacagtctaagactttattgtagtgactatgggtaaggcgttattacattgcggatgtcaacgaaggaatgtatccaagacaaacaaagtataacaggtcataatcgctggccacgttaaactgacccaggcgtctggtctcctcgagcgaggccctcaatctgggcttttgcatcagcagccccaggccgcgctcgtactggagggctacggcgtcgtgcgcggcaagcacctcgtttattgggaccggggctgtccggcgtctattctccagctctatgcctattaacctggtcaagttggtctgattgcgcccggtagacacgttaacagcgcggtgctgcggctgatcgcgagctaccgtctgagcgtctaagcatagggctgccaggccgggaaatagctgggtcaattccacctccctgttggctatgtatatgggggagacgtaacgctcgcataaaaaggtgaagttgttgttaccgctacgactaaccatagcggcagcatctcccccgctcgcccccctggcgtcacgctgcgatactgcgaggttgggtacgattgccccgagctgaaaattattgcgtaatctgtccgtatagacgttgccgttccacagcagacgacgcagcagcagcagcgcggtgatggtgttgatcgtcgagcgtagtagggtttggtcttccgtgagaaacaggttttgggcgcgcaccaaaaaggccgcagcggctttgtttacgtcgtctatgtacgcagtctggtccgcgtcgagttcgggtccgacggcggtgctcgtggttcccagactacccggaatggcgggcaaaacctttaggcgtatcagcgtctctagaacgccatggccgtttagcgcgccccgttcgtatcttccccctcctccgggaacgtgaaactggttctttgggagacgcgcgccgttgaactcgtacccgacctttccgagcgttccgtctccgagtgccgtggagaaagcctcgatgtacacgggcagctgttcgattagcccagaaaagctagtgggatacgtgtagttgctgtttacggcgcgatgggctaaatggaggcatagcacggctgcctcgaatgcggaatagggtctgtttcctatgtaaagcctaccgcatgactgcagagatacgacagccgttgtcataaacgttttagacatgcgaccgtctctatagtcgatgctgcgcgtggccaccggccgctccgtgactagacggtcctgaagcgctctgtaccaggtgccgaataccaccccgtttgagccgcccgcggcgcggctcacaaacaccgtggctaataagtctacggccaggttcgtgtcgaactccatgggaacgtcgttcttagcgatttgaatttcactgagcgattgtccgatgttgtcggggcgctgatccgcttcactcgcgtttacctggggcgtggcggcgtcggcgctctccgctgcacgcgcggcatcttcgagggccgccagggcatcagctactttggcaacctgtcgctctaggggtctaatcaacgcatctacgtttgcaactccgtactgactctgcgcctccaacgtgtctatggccgctgcggcggctctatggcgggccgcaaccagcttcaggggatccgccctggtgttggagcggacggtgaatgtaggtccgctccaaaagttaagcggaaatggcggggctataaagtttcgcacgtctgtcggtatagtggacgtggccgtatcgcttacgtaaagcgatcctaacacataattcacatactccgccatctccaccgcgactataaggtctttagcttcgatcttagtgtttatacttgcgtgtaggcgcgccgacaaaaaaggggcactcgtctttaattgcaccggcttttattttggggaaaaaagggacgccacccaggcgagggggtttacgtgcgatacagccaccggctgatggaccgcggctgcgttagtggtgtttgccgggaccgcagctggaaataaactcacgacggcggctgccgctgacggctgggctggcgttatagatggcactggctccgctgccgcctttgtactaaaggctttggccttggttcctttggcgacgcaccgcctccttgtcgatttagctgaaactggtggagcgtattccgccaaacgtgatatggtgcaggatagcacggcagcgttgctatatacaacctgtggcgataaacgcgttacccgcaacacccgcattcctcgttgagctacaaacactagtaccggagctagtacgatctcaccgcttcccgggggtagcgttctcgccagcaacctgcacgagtcatgtagctgtcgcatgccccccttccgctgtagatttttactcgcggtgttcatatttttggaaaagcgacacgtttttagctctattaggatgcacactcccttggcgtcagaaccctttccaaattgcacggtacagacacaatccgggcgccgctgtccgaggttaacctcaaaggccagagacacgcccagtgccgttttaagagtttccgctggcaccagttcactaaaaaggggagcaagcctctctccgtacacgccgtttcgcttggcgcttgccaggtcttgaaccatcgcgttatagaagcggttgtggcaccgtataccagctctgagtctgcttctagctgtcagacgctgtctacgtttcattttcagaaatcaatggcggctcgcgtaccttccggggaagctcgacggagcgccagcggggcgccggtcaggcggcaagtaacaatagttagaatttacctcgatggggtctacggcatcggcaagagcacgactggacgagttatggcatcggctgcgagtggaggaagtccaactctatactttcctgagcctatggcgtactggcggactctctttgaagcggacgtaattagtggtatttacgacacccagaaccggaaacagcagggagatttggcggctgatgacgcggcgtcaataacggcgcactaccagagccgctttaccacgccctaccttatcctacacgatcacacatttgggttgtttgggggtgacagcctacagcgtgggacaagaccagacctaaccgtcgtttttgaccgccacccagtcgcctcggccgtgtgctttcccgccgctcgctacctcatcggagacatgtccatgtgcgcgctgattgccatggttgccaccctacccagggaaccgcaaggcggaaacatcgtggttaccaccctcaatgtggacgagcacgtgcgaagactgcgcacccgcgccagaatcggggaacagattgacatgaagctaatcgccacactgcgaaacgtgtactctatgctcgctaatactagcaactttttgcgctccgggagagtatggcgcgacggctggggggagttgcccctttcgtgcgagacctataaacatcgcgcaacgcagatggacgccttccaggagcgcgaatctcctgagctgagcgacacgttgtttgccatgtttaagactcccgagctgctagacgatcgtggagtgatattggaagttcacgcctgggcgcttgacgcgctgatgctaaagctgcgcaacctgagtgttttttgcgctgatctgagcgggactccgcgccagtgtgctgcaaccgtggagtctctaatacccctcatgagcagcaccctctccgattcggagtcggcctcctccctggagcgggccgcgcgcaccttcaacgccgagatgggcgtctgaaactatatgtaatgtttgttgtgccagtgtaataattatgaaataaagattcctttgcctatatccctcataccgcctcgtgtgtccagtgtgtaaacttccaggttctagttttggggatatataagtggctgtgacctggattcatttagtacagtgcggccgagccactcaagatataccgtggctgtacattaacttgggaatcattacttccgcgatcatgttacaaccgtatcgaaaaatgctgatctttgcagttgttactgttgcctttgcgatggctgtctggtcaacgcccgtcccagccactccgtctggcgtgggtaacgctacttgggcaaacaatagcttcaacataaccaggtatgacaagataaccatgggacaggtttatagtaacacttcaaactctcccatcttcttcgttgttatatcggagcggaattttcgcatcgttaacactccgctgggcgcgtcggtattttggataccaaagggcgctatgaatcctccgcaacaccaaccctgtgtcgccaacgggccggaacctggggacccacgcgggccgtgtgtcaactcgaccgtcagtttattgtttaatgaaaacgtggagccgttcttaatgtcaaaaaatcttttagagtttgaagtgttgcccgacacctacataaccggttggacgtttgagcggtctaaaacagcgaccacaaaaagcaacccggttggtgtggttttatcgccacccaggggcagtccgtcagctaacacaacaatcagggacgatggcggacccaaaaagcccctgagcattatagacgaatacaccacgctcgtggcggacttgcaaaatttcactatgacattgacttacataagcccctttgccgcggtgtggcctattgaagcctttcaaacgggcatcacggtcatggggtgcgacactacacaggttgttgcgtatctcggccatgggtttatgggcctgcagataagctcggttaacaaccccccgctggaaatgatcgtcgtacccaatgacgtcagtgctcgtatacttaaccgacgcccctccagacttcgattggagcccccgggacctcacgcgggacctatctacaaggtttacgtactcagcgatggaaatttttacctgggccacggaatgagcaggatctccagggaggtggccgcctacccggaagagagtttagactaccgctaccacctatctctagccaacctcgacactctggcgatgttggccgaactctcctctggtaagagcacggatgtaagctattacatgtaccgcattgttgcgcgtctggccgtagccacgttctctctggctgaagttatacgcctaagtgactatatgctcctgcaagaagccattgatgtggatatgaacctccgcctcattgtccccctcgtgatgaagtacgccgcaggaggggccgcggatagctcgtacacatcttctgacgtggccatggaccagtttgacgttgcacaatcccagattgagaaaatagtgttagatatcaacgtggaggccgaattgcgcaaaccgatgtacgagcaccgctcactgttgagaagcgtttacgcttattccagaaagccgctgccaaacgcggtggccttagcggaccggctaatattggctatgtataaagaagccattaaggacagaatcacgtggaactccacaatgcgcgaggtgctattttttgctgttggcgcggccgccggttcgcatgttatcctcactgacgaacccgagcccggcgcgcccgcccacaaagacgcctcgctatttctatccctcaaccgcaacatcctcttgctgtgcacggctatgtgcacggcatcgcacgccgtatctgcaggtctgaaactagaggaagtcatggccggcctcgttgccggcggggtgcaatttagcctcctggaagtattcagcccgtgtatggcgtctacccggtttgacctggcggaagaggagcacgtgttggatttactttccgtgatcccaccccgtctgtacaccgacttgaacaccggcttcgaggacgacggaactaccatccattcttacgggcgatctgctaacgggattctaaactctcgcatcgcgtacaacttcgatgctgttagcgtgtttaccccagagttggcctcgtgtagcactaaactgcccaaggtactggtggtgttgcccatatttaccaacagaagctacgtcatcactcgtaccgccccaagcatcggcctgacctactcactcgatggggtgaatatagcaaagcctatcgttatcagttatatcacgtatggaaactgtgaagtctccagagctaccatcaagtctggttatttggataaccctggccacacgcagacgtgcgtatactgcgggagcgtgtttatgcggtacatggtgtctggagcaatcatggatttaatatacatagacgacaaagaagtggagctgcagctcgttgctggagaaaactcaactatccccgcctttaatcccaaactgtatacgcctagcatgaacgctcttttaatgtttcccaacggaacggtgacgctaatgtccgccttcgcgtcctattcgtccttcaaagttccaagcacttatctctgggcttctatcggtggtctgctgctcgctattttaattttatatataatcatcaaaatgttatgcggtggtgtaaccaacgatggttataaattgttattgagttatgagtaaacaaatatcccgtgtgttgttaccccccatgttagacaatatttgtgcgactgtggtatgtatgtgctaaaccagaaataaacactattaaaatattacgcgtaaaattgttgaatttattttcgctatatgcgggagcgagggctgctgcggcggcggcgcggcgggagcgagggctgctgcggcggcggcgcggcgggagcgagggctgctgcggcggcggcgcggcgggagcgagggctgctgcggcggcggcgcggcgggagcgagggctgctgcggcggcggcgcggcgggagcgagggctgctgcggcggcggcgcggcgggagcgagggctgctgcggcggcggcgcggcgggagcgagggctgctgcggcggcggcgcggcgggagcgagggctgctgcggcggcggcgcggcgggagcgagggctgctgcttgaatgaaaacggctctggagctcccagtgcttaaataggaaattggggcggcccaccggctagatgtgacgacataacgttcgcactgagttacaataattattatatattattagcaattggtgcgaacggagctctgggccaatcaaccagtctaaaacgaaccacgtgacatagaatccaatcaaaacatgcgtatcgattaggtatcgatacattatcgatacctaatcgatactcaatttcgcctaatgcgggttgtaagagccccaaggtgttggccggtgagcaaatagcctccccaagaaatgcgcatcccggtattaccatagacgcggcgtatagtaccagcgtatctcacctggtagcggcgcgtagtggattttgcccaccttaacatcatcagtcttagtaaaaggtgcggtgaaacggtgttaaggtacagagtgtttttattttctgcttacatgcacagttacacccccgcgcttcagcctctcgctgagtaagtaatataagtagtatgccccctttctgcttaagtccaggccatcgaatgctgttattgaagacacattgagcactattgccactggtaggccgctccccaagatgcgacaggctacctgcgccgctcctccgattccgtctttggcgtatagcttgttgaggacgctcgcgattctagcttccatgttacgtacctcgtcgtacgaactgagcccaagctcaacccgggtggcgtttgcagcaaactccgccagtagtctagcctccagttcgactacttccgaaccgctgccgttgacgggatcggtgggttgggtatagcgcacgattatctcgcacagctcacccaaaataccactttcgcgtattatctcattgacagcgtcggccaccaggtgtgggtctgggaggggatcgcgagcctctggaacagctccgatgtagctctcggctagttgttcaagggccgcgtagcagttgataaggttccacttgcccaagataaactggcagagcacgaaccgctgtagggttgtgacaccctgctgagtcagctttcccccgaaaaagcgcagtttcccctcgttgccgtatactgccaaaatggcatcaacgattgtgcttcgcgcctggttgaggtgttcatccaacccgggccacggttcttctatcagaatgatttcatcagcaattttaaatagtagttgtagtgattgtagcgatgcgccgctggccacgcgactcgccgaatcccagatgctgcagggctttggaatcaggcgcacctggacaaagtcgcttaccacagtttttctaaggggtcgtttggagcaccgggttgtgccccctattgccattgtttttacagctctgggggaggtaacgataatatcggtgcggctatgtcctcctgactcgtctcgtagggggggtcttgctactggaatatgatcaaatagtccacttatcagtgtctctagttctgggggcaactcggttaggtacgcctgaaccaaagtgaaacacgctatgtttggagtgtagataaaccccgaggatgcgtttgtgatagtgggaacagtatagaggtgtagcattccgtcttgtggtatatctctccccgtagatacgatgagtccagacgttacttttagagataccatacactcggcgaggtaggggtcgtatacttccagatcgaagctcccgcagatgtctctgccaaaggcctgggcgccctgggccaatacttctaaacgatcaacgaacacgtcctcttcagagctgggcgcactctcatggcgtcccgttcggttcaattcgctgcgcacataattggccactactcggtcgttgtgtgttagcccccgtaaggtcagcccaaactttgcgatttcaccgctctcggccgtggcatggggtctaggcacagagagcagacacccaccgtatagaaaatacacgcgatggccaccgtcggttatgtagaacacaacgccgttgtggatgactgtgtcgctgtacttgaagtccatgattcctaccgcggcgggtgtaagacacacagcgataaaatcgtacttggtggggtctagcgacccgtttggcttttaaacttattggctggggtttgcgagagacgctgcctctttgcggtcgcagctgcaaatccacaattgtttaaaagcaaattggttttatatcgaggagccactttaaatatgagatacctagaacggacggtgagtggtctacgcctgcctaggaacgtttatcacgtgggtcaacgcatttatataaactttgcggtttttagttttagggggaaatcactcgggacaaattagggggtgtccctaacggtttatggctacttttgcgatccctatttggcgtttttattcccggaaatgccgcattacgtggtagatatataaacgttaaactgtatgtcacgatattgacttttaattatacacgcttcaacgtgggctatagcctcgcatataaggtttccatcctggcgctggttagactagtccataccctgcaccgctcgcaggctgccagaaatatttctttccgaatttttgagggttggagatgccacaggtattaatggggaatacccgtttacacgcacccctcgaagatggcattcccctgatcgaaaacgatgaaaattcatcccaaaatgaagttgatctctatgactatgtgtctatgtcgtcttacgggggcgacaatgactttttaataagctcggccgggggcaacataacccccgaaaatcgcccatcattttctgcccacgtcgtcctgtttgccatttctgccctagtgataaaacccgtatgctgttttatatttctcaaccactacgttataaccggaagttatgactttgccgtggccggaggagtttgtaccgtactatactacatgcggctcgcgctcaccgcctggttcatgtttcgcaacatccaatcggacatgctaccgcttaacgtctggcaacaattcgtcatcgggtgtatggcgctcggtagaactgtcgcgtttatggttgtatcctacactaccttatttatacgctcggaactgtttttcagcatgctggcccccaacgcggggcgcgagtatataactccaataattgcccacaaactgatgccacttattagcgtccgctctgccgtctgcttggtcataatatctaccgctgtttacgccgcagacgcgatctgcgacacaattggctttacgctaccgcgcatgtggatgtgtattttaatgagatccagctccgttaagcgtagctagtaggggtgcctccgtgggaggcaccactggggtagcggccgactgacagtataaaacgtgagaagagagcagccccacgcgccattagcgctaggccagttagcgcggaggacctgagcgctacacccagacggtgcaatcggcggggtacaggtttgtcaccaacgacaggcattttaccactacgataatggaccggcgctcagaggcgttcaaaattccggtaccagaagtaatccccgccggacagattctatcaactatagaagtgtcgtcccaccgcactctatttgactttttcaagcagattcgctcggacgataatggcctttatgcagcgcagtttgacgtgctactcggaacgtattgtaacacgctaacgctggtgcgcttcttggaactaggattatccgtatcgtgcgtgtgcaccaagtttccagagcttaactacgttaatgatggcaccatccaatttgaagtgcagcagccgatgatagctcgggacggaccccaccctgtggatcagcccacccacacctacatgatgaagcacatcgagcagcgatctctgagcgcggcctttgctatcgcggcagaggccctgggccttatcgggggcacaaccctagacggtacgcagatctcatcctccctgcgggtgagggctatacagcagctggccagaaacgtgcagacggtgctagactcgtttgagcgcggaaccgccgatcaacttttgcgtgttttgctggagaaggcccccccgctgacccttttggctcccctgcagatttaccgcgatgagggacgccttgcgtctcgagtcaatcgcgccgtgctggtctcagagctcaaacggcgagtgatagaagacaccttctttctcaccaagcacgagcgtaacagaaaggagctggtggtagcccgcctggctgagctggttaactgtacggccccctccgtcgccgttactagaatgactcattcggacacaaagggaagacccgtggacggtgtagtcgttacaactgctggcgtgcgccagcgcctcttacaggggattctaactctggaggatatggccgccgatgttccggttacgtacggcgagatgatgattaccggcacaaacctagttactgctcttgtaatgggcaaggccgtgagaaacctggacgacgtagcccaccacttgttggggatgcagcgtgatcaggtcagggcgaacgaaaaacttattaaagactacgaggatgtgcccagcacggcgcgagtacgtgccgacctagttctcgtgggggaccgcctagtctttctggaggccctggaaaagcgcgtgtaccaggcgaccaacgttccgtacccgcttgttggaaatttagatttgacgtttatcattcccctgggcatcttcaagccggccaccgaccggtattcgcgccacgcaggaagctttacgccaacccccggacagccagaccctcgcacctacccaccccaaaccgtttactttttcaacaaggacggtaatctcgtacagctatcctttgacagcgccgcggggaccgtgtgccacagctcgtttttggatgtggattctgtgctggtggccatccgacgagaaccccatgagcttcactgcgcgtttggggcatacgtgaccctacccccagccggcactctgcttgaccagatgagaaggttttttgagcgctggcatatgctcatgccagcgcgaccccgctggaccgcggaggcgctaatgaccatcgaccaacttctttcgccaggcaacgcaaacctgcgcctggaacttcaccccgcatttgattttttcgttgccccggcggatgtcgtcattccaggtccgtttgacatgccgaacgtcatgcccactgtgatggccatgccacgcctcatcaacggtaacatccccctccccctatgtcctgtggaatttcgcgacagtcggggcttcgaactgagcgtggatagacacaggctcaacccggcgacggttttggcagtgcgtggtgcgttcagagacgccaactaccccatggtgttttacatcctcgaggcggtgattcacggtagcgaacgcacgttctgcgcgctagccagacttataattcagtgtatcgtcagttactggagaaacacccaccaggtggcgtttgtcaacaacttttacatgatcatgtacataaacgcctacctaggaaacggcgagctgccagaggagtgcacggctatctaccgcgaccttctggagcacgtccaggctctcaggcggctagtagccgagtacaccgttcccggagaagccgtgggcggccagggacacgacgcgctgaacaatgtgctgctcgatccggccctgctaccgcctctcatctgggactgcgacccgattttgcacagggccgacatgggcagggccagggctcaggagctatgggtggatggggtggactacgccgccattccttgggtggagatggccgaagttaactttggaaacaccggcggccatttggtgcacaacaggcccattcgaggagagaacaagagaaacccgattgtacctcaccacgacccagagtggtcggtgctatccaagatatactactatgcggtggtgcctgcattctcgcgcggtaactgctgtaccatgggagtacggtacgaccgcgtatacccgctcgttcagacagttgttatcccagacttgggggcggaggaaattgccccaaccagccccagcgacccgcgccatccgctgaacccacgccacctagtgccaaacactctaaacatcttgtttcacaacgccagagtggccgtcgacaccgacgccctgctgctactccaggaggtagtcaccaacatggcggagcgcactactcccgtgctggcaaccgccgcgccggacgcgggaaccgccaccgccgtaactcaggaaatgcgcactttcgacggaaccctccaccacggcattttgatgatggcctaccagcgtaacgacgaaactcttttggagggcaccttcttttaccccgcccctgtcaacgctctctttgcctgccccgagcacttgggggctcttcccgggcttaacgcagaagtcttggaggccgctagggatgtgcccccagttccccactttttcggtggaaattactacgctacagtcagacaacccgtggcgcagcacgccgtacagagccgcgcggatgagaacacgctaacgtacgcgctgatggcggggtacttcaaactcgggccaatagccctgtcccatcagtttgccactgggttccacccagggttcgcctttaccgttgtgcgccaggacaggtttctcacggagaacatcctctttgccgagaaggcgtctgaatcgtactttatgggccagctacaggtgaaccgccacgaggcggttgggggggttaactttgttctcacccagccacgtgctaacgtggacttgggggtgggcttcaccgccgcctacgcagccgccgcactacgcacgcccgttacagacatgggaaatctgccacaaaacctgtatctgacacgcggtactatacccatgctggacggagacgcggatgcgtacctgcggcgcgtggtcaacaccgggaatcgccttgggccccagggcccaaggccaatctttgggcagctgatgccggccacgccggcgggcgttgcccacggccaggccgccgtgtgtgaatttatcgtcacgccggtgtctgcggacttaaattattttaggcggccatgcaaccccagaggaaggagcgccgggcccgtgtacgcgtgcgatggagaggccgacgcagtggacgttatgtacgaccacactcagggagatccggcctacccgagccgcgccaccgttaacccgtgggcatcccagcgcaactcttacggcgatagattgtataacggcaagtataacctgaacggggcatccccggtgtacagtccatgctttaggtttttcacacccaccgaagtggaagccaaggggcgtaatatgacacagctcatagccgatgtcggtgccagcgtcgcccccagcacgtctaacaccgaaatccagtttaaacgcccccacggctcgacggacctggtggaagacccgtgttcgctgtttcaagaagcgtatcctctactcagctctacggacacggccctgctccgcacgcctcacatcggtgaaatcggcgctgatgagggacatttcgctcagtacctaattcgcgacgaatccccgctaaaaggctgttttccgcgaatttaggttgggcccgcctccaagtttcacatgctgccaaaactaaataaaacgcacagtttatatactcacttgtcagtttgctctgcttgagcgctagcgctccgtctcgacctcccagagtggttattggtacggttggtgggtggttttgactgcctttaatccctagcagactttaatcgatagaaggggcataataaggaagtctttttgggggggcgtcgctcgggtttggggtgcctccacgtagagatggcgagtgccgcctttgagattgacatcctactgcccagtgacctatctcccgctgacctgtcagctcttcaaaaatgcgagggtaagcttgtgtttttgaccgctctgcgtcgtcgcgtgatgctctccagcgtcaccctctcgtcatactatgtcaacggcgcacccccggacacgctatccctgatggcggcgtttcgtaggcgttttcccgctataatacagcgcgtgctgcccaacaaaatgatagccgccgccctgggagtcgcaccgcttcctcccggggcgttcatacagaacacaggcccgtttgacctgtgcaacggggactctgtgtgcgcgctgcctcccattttggacgtggaggacaagctgcgcctaggatctgtgggcgaggaaatactatttccgctgaccgttccactcgcgcaagcgcgcgaactcatcgcgcggctggtagcgcgcgcggtgcaggctctcaccccaaacgcccaggcccagcgcggagcggaggtgatgttttacaacggacgaaagtacaacgtgaccccggatctcagacaccgagacgccgttaacggcgtggcgcggtctctggtgctaaacatgatttttgccatgaacgagggatcgcttgtgctgctctcgctgataccaaacctgctcaccctgggaacccaggacggatttgtgaacgccataatccagatgggaagcgccacccgtgaggttggccagctcgtccaccagcagcccgtgccccaaccgcaggacggcgctcgccgcttttgtgtgtacgacgctctgatgtcatggatcagcgttgcctcgcgtcttggtgacgtggtcggtgggaaacccttggtgcggatctgtacgttcgagggccaggctacgatttcccgcggcgagaaggcccctgtcattcaaacgcttttgtaacctcaccctccccccaacgcccattttaacccccttatgcaaataaacttgacaccatgttatatattacatgtagtatgagtttttaatgatgtcggcaaacaaaactaacacgtatcctcactgcgcggggagactggaaaacgcatcgctggttggcgggaggctggacaaataaacggccatcaccagggccaccaacatatcgtccgacgcgccgttgcgtttaccggtaaacactctagtttcggaggttccggtaaccacctcggttaagtttttcatttgcgtcagcaggtactccaccgggtctgtttgcaggcgcaccgtatttgatactagctcctgcgaagctagcaccgagccggagttgaacgctttgataaagtggtcgaaggcccccgttttctgtttctggagtagaaaaaacgggtaggccactgagcttccatggggcgtgcaatgataaaacagcaccgccccgggcatgggcaccacgtcggcacggcgtagcgtgttgagctccagctgaatgtttgttgcgatggcgactgcagcgtcttggctactgttaccctctaccgcaactcgaactgagtcaaaggggcgtttgtgaatggcgaaaacctgcgccaggcactgggcaacacacctagctatcagctccgcggaactccccgtaagggcgctcaggaaaaagtgctccatgccgaacacgacccagtttgagcgatagcggccgactacagccacaccggttcctgaagccatagcatttgtagtaaacgcaggatccacgtatacgtaaaggtcgctggacataatatcttgattagcgacagtagaaggtctgtacaacaagaaacggtcttgagcagtttttgtaaaaacgggctcatctcgatgtgctccagacacgtttcctccaccaattatctcctgcataaacgagtccggtaaaaatagctccgctgtgttacgcatggccccgtccattgttatgaaaacgggcttgtttaaaatgtagcacgagcacgccgtggcgtttgtgtgcgcctttacgcgctccatgtgctcgtcgcatatgtaagtgactacgttcagcaggtcgtctgccgccccctttaggttatataaaaagctggtactggccttgcccgtgttggtggaggacacgaagatgatcttgcagttggtctggttcagaaagcctataatcgtttgcaccgcttcggggcgtataaagtttgcctcgtccacaaatagcaggttaaagtcctggccgcgaatcccctgaaacatagagagaataaaaaaagggatcgacgggttaggcgtttcacttaagctcggctctcgacgcgggccgcagcaatttcttgttaaaccggctaccctgttccatacctcccggcgcaccaacggcgcagcaataatccgtctgacactactatggacgcgcacatcgctaacgaaaccaagcatctactggtacacggaaacagtaaaactcgcgcgctggtgcacataatcgttcctgacgcgtgcttaaagaaggctggcgtcgatccggttaagcttagcgaccgccatagagctagcccatccgcggctcccgtatttcgggtgtttgcccagactcgatatcacgccactggggaatgttcgttatggcgcactgtttttgctggatatgtgcccagcggggctattgtgagcgcgcttgtgccgacagttccagcggaccacccacggctatttcaatcgactcccgactccggtgggctattcgtatcactagaaattgagtgcgacgccgatggccgctttgacgcgtttactctggttgcgctgagagtcgacattgccgacgacccacgtaccactgaagttttgtttacctatgatgagctgttgcccccaggcactcgctacggggccgattccaagcgcgtagcactcctctgtcgacaattcgtggcgtatgtcaacagccaccccacagtttcccagagcgccgttactgcggcatcgcacatagaagccgcggtcgccgaggatgtaaagtcggctagcggtccccaggtatcctacggggctcgcatcgacccggccgagtacttattttcgggcgggggtttcgacaaccaccaagccctggcgcggctcgaagatgacgataaagagataatgtctctgatccgcagggcgtctgaggtgattgcaaaacgcaacccggttagggtgctcagcaatccagaggttaacggcgacgcccataggcggcaatgcgtggcgtccggcctccgacagggtgcccgcggggcacacgcgtccgactctcatgcgcgtgttgggtttaattccagtatccacgatgcgacggccttgctgttgggcctggagcccccagattctggcagatttgttaacagcggcccccagcggcatctgccccctcagggacccaggagccccgcgagtcgggactgccagtccgggatgctcgatgacgtgctgttgctcactccggaaaactccaacccgctcacccccctcgactggctggacgtgggccacgccgccgtggccggaggagacacccccagagacgtgtggcggcgcaggccgatctccctagtggcacgaaagcactacgggacctgcgaaacctttgtagtggtgtcgtatgaaaactccaccgcgtgggggggtcggagggcgcgcgacggacacttggccgggtccatcaacccccccgtgatgcaggcgtgtgtggcggccggtgtggaccatcccagaaatttgccgcctgagactcgcggtgaactcatcgctaagtttccgatgttgactgtgcccctgggcgacacgccgccgcccgtggccgcgtttgacgccgctgccgagttggctctgatagatcactttcgaggggcctgtgtttccgcccttctaaaagctatatcggaacgcctgcgcgcggaacctaggatgtcgcagctaatcgagtatgacattccaaacaacaaccgcgactgcatcatcagcgtggcgcagcgcgcccccgagctgctagaagccgtggcactcgccattcaaaacgttactgtaacggagttttgcaatagcgccctgatgctatcggctctttcgcatctaaacatcctctccggaaacaaacgtgggcgcctaccctaccacagatcttggcttcccagcctggcggggggggcggacgcctttcttttcgactactacagctccggtggcgaagttgttaaagtttcccccgtcccactggctatattagttaccgcaaccagaacgggccaacattcgtgcaggtttgcccgaggagcgccggactcctcctctaagacgtatgagcgctacctgccgggggagtgctacgcgtacatatgcgtcggcctaaacagatcgtttgaggctttggtagttttaccaggaggctttgcctgccgagctagcgcggctcggaaactcgcgtggcccgctcatctcgtggagcccatcctagagcgctactgttggacaattccttctcactgagatcatctctacgtgccgcatgatggccgccgcctcagacagctgtttgagtttatgggaggggtccgcgtcgtcccccaaccgccaactaaccccggaagcggtgaactgtttaacggaggcgctcacggaagacgtcgccgtgctacgcctcatacgcagcgatccccgcgttaagatttttatggcggttagcgttttgacccccaggctggctaggtttgcgcctcccccgcccaagctcacccacaccgccaagtgcgccgtgatcatgatctacctgactcgccccaaggccctggcgctacaacccaaacagtttcacatgctggtaaccttcaacaaggccagcgtatactctctggtggtgcgggtgaagacaaagccctttcccgtaggcacccagagattccgcgccgtgtttcaagaccccgagtctatcgggctaccgtccgacatccctgacccggcagcagagaacatcccaaccgagattaacgaccgcctggacgtgagcaattttgcaaccccggcacaaccccccaaagacaagtacgactgttgcgtcctggctcctggcgtctggtggtctaacgcaaacaaggctatatactttctacagatggacgtagctctgctggctctttgcccggctggatggaaagccaggggtctggggatcattcttgggcgtctgcttaaccaccaagagggttgtgctacgtgccgcttcaccgaacattcagatccgctgaatgcaacggcagactcggtggctacccccgaatcgtgtctatgctgggcgccgtgtctgtggcgaaaggcacaccagcgagagttaaccgtggagggggatcgatatctgtttcgagttctctttatggatgcggtggagcgagtgcgtttgactggcctgaggcgcagcccaaagataacagccaatctcgccgacttggttgtggggattgggccgcacggacagcagattcccgtcaacaacgccggatggaaactggtggcgctagacgctgatatcagcagactaatcgtttgcggatgctacgccctgcgatacatctgtccgcccacaaacagcaaacaccaaccgtcttccccagacgagtacgcataaaccccgttcctagcctagtatatacgcccatcacccactcgatactgacagctttgccccttttaaaccgccaataaacagttaaaacccaacaccgtttaccctctctctgtttttaacccacaaaacgcgtcgcttgggggtggtacttacgttggtgttgtgactagatgcgaacacgattgtgcttttcgatccgtcgggaaaggagaatgatatattttcccctttgacgtgatctactggagagttcccgaaccactggcggagcctcgcgcctatctcatcaaaaaccggttcggtggccttgcgtatgtgggccgtatatccgatcttaatccccttgaaggtcgctagcgccagagctatcaggggcaccaaaaaccaggtttttccatgacgtcgcggaaccaagaatacagtcgcgcgttgccgaaaatggcggattgttgcgtcagaaaactccggggtgttaaacaccatctttagaaacgcccctatacggtcagcatggtcccccaggatgactgcagctataaagtatgtagcgtgcatgagaatcatcttttgaaatagctccagagtcccgcgctgcttcccgtaggtgggaacgtccaccctggcccgcttgcttgcctgttggccgtccccgtctaggtcggctccgttaaaagaggtgtccaccaggcgactgaagcgcgccacaaagctggctacttggtgaaaggcgtctgaggagcggagagcgtcgaaggtgttcatgatactgtagtacgcgtttctacacgagcgcgcctcatcgtcgctgtactcgacaaaggagatagtcttaagagcctgtcgcaccttggggtccacataagcctccacggaggccgggtctaaccgttctctcgcctctccgctctgccattttgacaggcttctaaacagcagcctcctagccacagaagcaaatatttgcgcggtctcgcagcagtcgtgtaacgtccctaccccaggaacgacggtctggtggcgctggggagtaggaatcgcaaagttgagaaaggccgttttcgcatcatcctctccaccattttgagcttccgcggctctgtttttggcccctcgacgcgcttggacctctcgccgcagcgcttcaaaatactggacggtctccctgcccagcaccctaccaaacattgcagcccgaacccccggtggttaacggtatgagcttctcggcacggtctaggcgccagaggctgcaattggaagaagcctaccagcgtgaaatgatttttaagatgcacaccctggacttggtacgcgagggcgttaacaaacgcagtcctgcctttgtccgtgcatttacgtcagcaaaagaagcaagtttggacctggatagatacatgcaagcacattccagggtggggcgagtagaacaaaacgccagagcgctcgcgcagcgagtggaggcccaagctgcagtcggcgagatactagacaggcaccgcaggtttctgcacccagattttattgataactttgattcgcgcgaggactctatagtagaaagggaggagcgcctgggtgatgtgctatcagatataaactgcgacggaggaggcggtgaggtcggagacccacaggaatggctaggtcacgaagacgaagctctgttgatgagatggatgttggaggaagcgccacgagtgagtacgagaattgcggcggaccctcattctccccgctcaacctgtcccgccccaagaaaagcaccagaggacgctcgctgcggagcgcgcaagcctggggaggtaaacaattacaccccgagcgctcaaccccgctcgcaagaaacgactgtggaccatctagcaagcccagacgaaggcacgaggttgggcgatcgaacaagggacttggagcatcactcgaccgcaccgatgaggacacatcccaatgtcctcgcatcagagcgtcggcgattaggtgtggtgcatcaacgcgaaaaatcgtcagaatcacaggagagtgcgacgcgcagcaaggcgatagtcggccaggaagatcagaaatggctgggtggcattccccccctaagcgacgaagaactccaagtcgacatgggaattccgacaatgaacggtcccatttacccagattatcatcgcacggcgtagttagggttgggggtcgcccgctcacacagactcccctccagaaaacgataattttacaaccaaagctcgtacgcaaagtgtttatgcctacctttacagtgaacccagagatgcactacaggcgcgtggctctgggtgagataccaaaatttggaggcgccggtagctatggagaggttcagattttcaaacagaccggcctggctatcaaaacggcctcgagtcgctcctgttttgaacacgagcttgccgtgagtcttctgacgggggaatgctcgttgcgcgcgcaagctagcctcggcatcgggggaatcatctgcctcatggccttttctctgccgtccaagcagatggttttcccggcctatgacgcggatctaaacgcgtacggatacagactttctcgcagcggccctccctccgtcctggttacagagtcaatcgaacgagcgttcatcggacttggtcgcgccctggtatacctcaacaccagctgcggcctgactcacttggacgtcaagggcggcaacatattcgtcaaccactctcattttgtgataagcgactgtgtaatcggagacctgagcctgatgacattgaatacaaattctatggccatgcgggcggagtttgaaattgataccggcgaggaggagattaaaacactccgcctacccagaagtgcgtcacagatgacattcagctttgtaattggccatggacttaaccagcccataagcgtaattgctgactttattaacaatagcggactggcaaagagtactggtccgataaagcacgacgtcgggctgacaattgacctgtacgcccttgggcaggcactactagagctactacttgtcggctgcatctctccttgcctgtcggtgccaatccttcggacggcaacctactactactactccaacaaactctccgtggactacgcgctagacctcctggcgtatcggtgttctctgtaccctgccctatttcccaccacccccttgacgactatctacggcatcccctgggaccaggtagaaggcgtctttgagagtatcgccggggctcaccaccgcgaggcgtttagagctcacctggagagataccgcttgacgcacaggcggttgtttgcgtctatacgaataccgtccgcctttaccggagtgcttgagctcgtctctctattgtgccacgccaacgaaaaagcccgcctgtcgattcctctgttatggactcctcgcccgtgacttacagcggcgaacccccgtataagctgcgtcgcctcagcccctcgtatccatacgtttcaaagttacgcgagcgctgtgcgtcaaagatcgaaactctttccgagggcagcgcacgagatagcctcgaagaggaggacgtgtctgaggccatggcaaccggtgcgtttctagctacccgtctgtacttaccatccgttttacctcaaagaataacaacgctgacgtttttggaccactttaagaagagccgtcctctccccaatagcgataagcgattgaatcccatcttttatcgcctggcctacatacgcgacctggtaggagagatggagctagaggggatcgtggaacgcggaactgcctcgcgtttactcggcgccagctccccggctggctttgtggccggaacgtacacccacgcgcgggatctgtccaaaacaatgtccctggccagcgtcagggacgccgtgctagcgatagaggcgcagactcgcgaccagagcgagagccagctgtgggctttgcttcggcgtggattggctaccgcgtctaccatgaaatggggggcactcgggccgcagtaccacccgcagtggtgcgaggttagcaccaacgccaagggaatcccaaacaaccccgctctccagtttggacaaacaaacgaacggacggccaggtctctcatctcggctctctatgtcgcccgctctgaggctgccaccccagacttactggtggatcctggatgcggtcaatgctttgtgtttgacgagtccgcaagcgtcccgggagacgcttatgcctgtggcctactgatggacgccagaaccggcgtcgtgggcgcgtccttggatatgctggtgtgtgaccgggaccccagcggggtgctgtctccccactcgactcagactacattggattttttcgaaattaaatgcagggcaaagtatctattcgaccccgatctatttagccccgtggctacggcgtacgccaacttgctgaaacaccgcaccgcggtatgcctgcgaaaatttctcaggtctattaaaaaccccgcagtagagtatttcgcatcgactagcgtgcccggggcaaccgaagcgctgattacgtgcaactcttcgtggaaaccacgtgaggtaaatgagaccaacaggcgttgcggtgactttgatagggaccacattgctttaaacctggacgcgtcatcagacgtttggctatttagtgagccggaccttgagtcggagactattactccagcccgctgggacacaggagagttggcgctgtcggttccggtgttcgcaaaccccagacacccgaactttaagcaaatactggtgcaggcgtacgtgctatccggccattttcccgaccatcaactcaggccgtttttggtaacgtttattggccgtcatcgcaagaggtgtgaggagggaaaaacgtttaccatctgtgatcgccctgaggggagcccgtacaatctgaacgaggttgtccactctagctgcgctatccccattctgctatttgtgaccccggtgattgtggaccgcgagggttgctgggaagacattgagatcgagagtctcaccgcgttcaacaaaaccgccgacgcgatatgggacagcgactctcctgcggatgtttcagaaccgaccagctcgtaactcactctggcgaagtggtatccctgaacgcggacacctttgaggaatttagcatggaagagtttgatattcccccacccccacctctcccgaaacccgtcttcaagcaaccaggcccttacaaaatcccagccagatctcaacgctgtccttctaaacgacgagacccctattaaataaaatgactgtaaacgcatataaacgtatcaggtgttttattttttctatagtagtgcgtggtagcgtaagcagattcatggcctttgtataccactggcacgttgatgctatcggtactcccggcgatggcttctttccgggacgcgctgtgggtcgtcataatattcggtttcaaattcctcgctcaccacgtcgtaaattggctcttctgcgtccgtttccgagtcttcggctaagagcatgccccttgactctgccacgttcaagggttgtgggtttctgcgcgggcccctcaccttgttgacgtatctacgcgccttggaagacacggtttttacgcgcccgtaaaattcggtattccgcttcttgtggaacatgatagctctgaccagtctcacgactagcatgatgatggagatgaccgccatgattccaactatggctttggatgcggtggccagattcggggcctggacggaaaccatggcatggaagtgaacgaagtagctgtgggttgctacggccagcgtggagctcgccaccaaaactgcgagggccggtcccactagaacgtgtacgtagtgggacacgatgagttcgacgattatcaaaaacattagtccgagggccacaaacacgcccacggcaacagtcaccgtttgccacagggtgatgtgaaagctgttggcgagtataatccctagcatcagcgacagtatcggcagggaaattcctagcatccccatgccgaggttggtcataaccgcgcgtccgggtccggccattttatgtagcgccggtaggttggtctttagtatccgaagattactagagtattgagcgctcgcggttcccaggccgctgaagctcatgcaaaaaaatactagcgatacaaagtgaaccacgtaaactgccgcccccaggactgcctgcttgtgcgagagtagcagtattacaacttgcagaagccacgtagccagcgtcccgagtactagggtcacgtgggacgcaataagcgtggtcgttggccgggtgcacccggccaccgcggtgcactctttcccccgggcatatctccgaactagaacggccgagattatgaggtagaaggatatcgccaccaggacgagtgtagtgtagtaaagaaacgcaaccaacgacgttgtctccaaaaatagagtcggggctactccaccagctatctgccgcatccacactccatcgaccacgctgtggtttttctgcgtgtagtcaaccaatgacccataaaaacacggatatccggtctgaggaagagacgccgtcactagagtgataaaaagcacggaggttgtaagtgcgaaacagaacacttgcaccagccacgttctccagttgatgccttcgatcggacctatcccaacaatccccgacgagggtagcagaggctcttctgcgacagctgctccccgtcgtgccatggcgagttatcgagatactacgctgggcggcagagcggaaggtgtagctttctcggccgtggaagacagctatacttccagcgtttctttggccaggatgttatatgggggcgacctggaagagtgggtgcgtcacacgcggcccggtgtgagtttggaaatccaatcgagggctccggtacgctttcctccgcccaacaacccgtccagcaggcgcgtaaccgtcgtaagagctcctatgggttcgggcaagacaacggcgctgctaaaatggctcggagaagcgctggacgcgcctgatattagcgctctcgtcgtttcgtgccggagaagcttcactcgcaccttagctaaacgatttaatgacgctgaattgcctggttttgctacgtattttacgtccacggactacaccatggctggggagccttttcgtcgcctgttggttcagattgagagcctgcaccgcgttgacgataacctcctcaacaattacgacattttagtactagacgaggtgatgtcaacaatagggcagctatactctcctacgatggttcacctcaacaaagttgacgcccttttgactaggttgctaaagacatgcccccgggttatagccatggacgcaaccgcaaacgcgcagctggtggatttcttggcttcggcgcgcggcgagcgcagcgttcacgtgattataaactcatttgccgcgcctggattctcgcagcgcgacgggacactactgcgaactcttggaactgacgtattgcgggcagccctaggatttgttcttgtggacgatgaaaacggaaccaaggttatggagacggattccagacccatttcagctagactgcgcgaggtcaactccgcggggtttttcggccgcctgatggacagactcgtggcggggcgcaacgtttgtgtgttctcttctacggtttcattttcggagatcgtggctaggttctgctcgcagtttacagactctattttggtgttgaactctctacgacccagcgaggatgtagccttttgggggggagtaagggtgctgatatacaccactgtggtaacggtgggccttagttttgatacggctcatttccacagcatgtttgcctacgtcaagcccatgagccacggaccggatatggtttctgtataccagtctctggggcgcgtcagagagcttattcacaacgagctgttggtttacgtggatagctcgggagcccgtgcggagcccatctttacccccatgttactcaaccacgtggtgagccgccagggtgggtggccggctgagttctcgcaggttacggacgccctctgctgtcagtttaaggctcgctgtggaccggcttatagaacggcgtccacgcgcgggctcgctttgtttgttaggtttaaatataaacacttttttgagaggtgcactctggcgagcgttggcgacagtataaatattttatacactctcctcgagtctaaccaaatgcgcgtcgctatcgaggggtgccaattccctctaacggccgcaggtttttgtgactttctgcaagatctgagactcgacgcatacgccgctaggaaagagataaagcagctgcgcggacccgggggtattgccgccaccccgacggaggtttttgaaaacgacgatgtggcggtgtttattcaaaagtacctgcgccccggtgttgcgcacgatgagatattggcactactggtagagctaaacagtcccatcgttcgagagcagttcgtcaatgtggcggtcctgggcgcctgcctgcgcctcccagcggccctggagagtcccgaagtatttgccggagtttacaagcattacgcttccggggtcgtgccggtgattagtgacgccggagcgcttgagagtgtatcaataacaccggacgttaacgttctagcgcgctgggatctgtataaaagctgcacgcgccatgcccgcgatctagcctgggacccgtcccgcggggggtccgggctggacatgtcggaagattttattacaaacactctgagcgccgactataacagattccagagtctgctggtggagatagcaaagtgtaacgtaacacctttagagatgctagctgcgggtgccgttcgaggcgtcactaccgcgctctcgggtcgccccaaaagcagggtcccgctatcaaaaggagagcacgcagtctccctctttaaggtgctgtgggaggacgtgttcggggcaaagcttgccaagagcacgcaaacttttccggggggtgtgcgggttaaaaacttgcggaaggacgaaatagtcgcccttttagagtctgtaaatgtaaaccactcagagtgcaaaactcacagagagctgtacgccctgttaatgtgcaacaggaagctgtttgcgggacccagatataagctgagggcgccaaagtggagcagaaacctctgttttctagaattggacaatactggcacctgcaagactccgcttgatgccgcgctggcagacctagcccctagcgcgtggccacaggtttacggagcggttgacttcgacgcactgtaacatcaaccaacccacatggagggcagcgtcgaatggtttaacggacatgtttgtgctaccagtatttactctctatggacagatccgcaccacccagggcatcttcaggcgctcgtctacatgctgtgtcggcgcggtagcgactacaccgcagagttttgtcacgttcccgtctcgggcgaactcttgaaacgcggagctcgcgacgcatctctggtaacaccggcgcgcgttgccagcgccgcgcagaccgcggctgtgcctgggtgctggcccctggctcccctgggaaacgccatgttgtggaaatccgtctacggtggcataacggcggcgcttaagcgcgccgtgggaagctttgctttctatcaacccctggtgttaggaattaacacgcaaactggacttttagttaccctccgacccgccgcgtctgcgggtgaaggcggtggcgaccacgtctctccgcgggcggcgatcgtaaatgtgtcggtggaggtagacttggacccagcgggcattgaagcgagcgcggctagctccacaggatcgtctctcgccagggccagactctgcacgcttcgagatggatattttctctcaaagcgggacattgccctagaagttgagatcgctacaaaggaggtttcattttacagaaagtatgactctgtgcaacagcctgccaacaagcgtcgcggcgacatggcagatttgttcgtcgtgcacgaacgaacccttttgctagggggatgtaaacgaatgggagttaaggttctattgccgcgaacgtttgactgtttagttgccagctcccagtcagtgtcgggtttagctgccatggcgctgtacaaacagtggcacgctactctattctctgtagagctaccagatactgttgtgcaaatttttgcttacctagggccagaattaaacccgtgtggagaggaagtcgactattgttgctttgttggatttcccggactcccgaccctcaaggctagttcgagcaccacggaggctgtgcgcgatgcaatggccgcctatagactgtccgacgggctgtggccggctctaggtatgagcgcgtttcactttttggctccatgggacccggaagacaggtggcccggtgaatcggaggcaaaacgggtagagggggcggtacacaggcttcagcttggtaccgaggatgattggggggctgggcgggtatcatgcattttagagtcggacgctgtaatgcaggggccgtggttcgcaaagtttgacttttcggcgtttttccccacgctgtacctgttgctgtttcccgccaatgagcgcttggctgaggtggttagattgagggcacgtggccaacaccccacccttaagctcgccttggtatccttttttggggggctgcagcacatcaaccccgtagcctataggtccatcatagccctatccaacggaatcagtaagcggctggagcacgaagtcaatcagaggggttttgccatctgtacatatgtcaaagatggcttttggggggcagccggaaatctgccatcagactctgtatcctacgccgacgcgctggtttacgcagaggagctaagaagcgccgctcagaaggcggccctcggacacgtgtccgagatggggttttcgctgccggagggtgtccacttgaatttgcggctggagggtttgtttacagacgccatctcgtggtccacccactgttactggttgtacaaccgcttcaccaagatggaagactttgtaggcttccccgccaagagcggggccggcagagccgcgaaggcgagcttgtctgccttgctaccgctggtagccgcggtatgcgactctagcgatatgagcaccctccatcagtctgtgcggggggcctgcgaacagctggtagccggcgcttttgccgagcgcaacaacccgcagttttggagtaccaggacggggatcgagtcgtctacgctactccccccggcagtttacaggaacggcagcttgctcgacagagactgtgggcagagggaaattgtgttgactcgcaaacacgactgtgaatccccatcgcccgtaccctggacgctcttcccaccacccttggttttggggcgcattgactgtatggtctatcttacgtccattttcaaaacttatctaagcatgttaaacagagcaatatctgcctcgtgcgacgcggatgaatctatgaatgtggactttccaatctctgattatgcatttttatttacctaaaaataaagaccataaacgttattttttttcagtttatttttgttgtttggggtacacacggtatgggcatcataaaacccctccatctcaccagctagtcgtataaaacatatattgattccggcacaggcttttcgtccgtagcggtccaccagctatagagagtatcagccactactttagtacatagcggcgcattgaggtgggctttattacaacgcaagacgccagaggggcagggggtgatgggtcttttggatagagtctgtctgtaccctgcgctgtaaatagcatcaagtatggcaggggtgtttgatttttggcccagtagcatcttggccatcatgtagttgggcagcacccgtgcctggtcaaaggggttgtggttggtaacgcacatcagcgtgtttagcgtccacgtggcgcctatatacatcaaccttcgcatctttagaaggggggtgattgtcttggatatgttacgcagtatacactcaatttgcacaaaaagcgatgatgtggcgcgctttgtggagcagttctccaggtacatctggatgatacacagggtaaagtctataaggtcggtcgggcgatacagcaccagcctgtgcgacagtataaccggagccactccgagcacgtttacccggtcttccaggggagtcaccacaaaaagagagaaccccttaaaggcgggcagatccaagcacgagcgcatgtaggtctcgcaggatatctccgagccctcctgtccgtcgagggtcaacatcagtttctccgacgacgcgtctactctcatgtcagtgaccgacgtggtcgtgaaggaggggggtaggcctggaacctctctgacttctgtcacgaatcgaggagtcgcgtgccagaccagatcgtcgacgatagttgttactgaatcgtcgccttttgtgatagcctctaccatttcgtccacggtcgcgctgtgggctagcggatcgatctcggccctcatagtagcgctcatcactaggtttgcccagctgctcctcgtcagactgggcctcgttgtcgttaactggcaggtcccgctttgtggaattgagagccgcgatggagtttctaactctcgccacaaagagagtagatagctctgtaagataagcctcgagccgggtttttttgaacaccgccacacacagctcctcctccgagcggtacgcctcctggtgtgtaatcaaaaatccaagatgacgtgccctgaggatggagaaaaagtatggcgctagcagtagggagattgagctgttggagtaggaaacggacatctcctgaccttggttgttggttattctgttcattttgaaacagcgtagcaactcctgatcccacagacgagataggcgctccatatcggccgtgtacgccggtatgtacctagactgaaagctattggccacgtatccgtcgtctcccattaggtttctgatgtcgataacctcgtgcccgagtcctcccgcgccggacttggcgccactcccgggaagggccgctgagctcgcaccgggctgggtactcccgtctgccgccgcctgggagacgcgcagcagttgttcgcggaggtgggtgatctcgctctctcggtcccggagctgatccaaaagcccgctattcccggttctcaggtcctctatggtcttaaacaagttgtttacgtatccctccaacatcccgttaatgccgttgatcacagacgtgcgaaaggcttcttgcacgggcatgttgccgccctgtttggttttcccgctctgcccaaatccgggcagggaggtgtctacctgcgcgccgctgagcaaattggtactcgtctcgtttagatacgatctaacggtctctgttatgtcccctatgtgccgcatgcttttcatgttgacgatgagtttaaccagccgcgacgcggcggagctggaatgcagctcctctccctcgcccatgagcttgtccacggccttggaggcccacccagggccctgggcctcgtcctttttcctgcccaccaaaatcttgacgggtaccgtgttgagaagctggcacagttttgcgtgttcccgcagggcgtggcagttacacacctcgccgcagattcgctgtagcggtgagtcgaacagcacgctgccgtccttccatattggctgccacaacaccagacactctccccgcttgcccgtggtcgagtctatcgccaccacctctctgcgggtgtagtggtagaatatattcaccctgtcgtagtccatgatggccacgctggcggtgcacctggccagctccaccacggcctccaacccctctcgcaggaggctgttggccacatacagtttaccggccaggtcacgctcgtccacgcagctctccagcgagggaacgtccgtgggcagcttccgccacagcttagggtggacggtcgcgccgggggcgcgcttgagccgctggagcggaatcagacccagacaggctatccagtctatgtacttggcaaagctggcggtgccgtcgggttcgctggcggagaaacacgcggttatactgcgaacaaagtccaagagcgacatctgtaacgtgcgatgccacgtggcaaaaatctgttcggcgactcgcaccgcttccccctcgctgtacattccatacgtggcggctatttcctccgcgctcacaccacggctgtctaggtgggtttgccaatccttggcgaggtcctcgtagcgcgtagcgttgagcgtgttggtcagaatagtcgtctgtatctgtctaatagccgcctcagttgaccgaatggcgttgtatactccctgaccttctgtgtaccctagctcccccatgaggatctccttgaagagcattgttttgggggttgggtgaataagcacccaacccccatcagcggatatttgctcctcctcacccggactctggaggccagttgtagcctcaaagcgcggggtgtttttccgctctacctttcgccctttgtttgcatcagcatagcgaaggcgtttttgcttgggttcgatggagtccgccgacattttaccggggagtagagggaccgtggatagacgctgcgagggctccgaggagaaaataacgccgcctcgccccgtcgaagattttaatccgcagcttttcccaaacgaggtatatttgaactttacgtctatgcacggaattcagcccgttgtagctcgtatacgagagctgtcaagaaaaacggtttctgccgctatggtgccgccgttagaatggtttgaaaggctgccaagactggaaactcctctagatatagagccgttacatctacccttttccgtatacctcattagcgggaacgccggctccgggaaaagtacgtgtattcagacgctaaacgaaaccatggactgcgtcattacaggcgccacccgcgtggccgcacaaaacgtttacacgaaactttcctcggcattcgcaacccgccacatcaacactatttttcaggagtttggatttcggggaaaccacgtccaggcgcagctcggaaagtaccaatactcgtgttcctcgagcccgcctcctatcgaggagctgcaaaagcgggatatcgtttactattgggaggtgctcgtagacatcacgcgccgccttttcgaatctacggcgtcccgcggtgagtttgaaaacatcagggctctggagcgcctgctggggcgtgcaccgggatccttgactaggctcgccttctgcaccaacggctcgctaccggcgtttaccagaaccaatatcgtcatcatagacgaagctggactacttggacgccatcttctcaccgtggttgtttactgctggtggatgttgaacgcggcttacaaatcgccgcaatacgccgagggaaaggttcccgtgatcgtgtgtgtggggtcgccgacccagacagattcgctggagtctcgctttgagcataaaaacttaaagtgtcacgtcaggtcgagcgagaacgttctaactcatattataaccaacagaacgattcgtgagtacgtttctctatccaccaattgggcaatttttataaacaacaagcggtgccaggagtacgagtttggcgagctaatgaaggtgctagagtacgggcttccgataacggaggagcacatgcgcctagtagacacatttgtggtcccagaggcctacatcaacaaccccgcaaaccttcccggctggacgcgcctgtactcgtcccacaaggaggtgagcgcctacatggcaaaactgcacgcccacctgaaagtgtcaggagaaaggcaattcgtggtgtttactctaccagcgtacacgtttgtgaagacggcggcattcgatgagtataaaaagataacccagcagccatctttgtcgctggataagtggctcgcggccaacgcgagcagggtgagtaactactcccagagcagggaccaggacgcgggaaagacgcagtgcgagtactactcggaacacggagtagtggtggccagaacggacgtaacctatgtcctcaacagtcaggtgtcggttactacgcgcatgcgcaagtttgtgtttgggttcagcggcacgtttgaaacgtttgatgccgtgctcaaggacgacgcgtttatcaagactcagggggagacgtccgtggagtacgcctaccgctttttgtcgaccctgctcttcagcggcatgataaacttttacaactttttaaagcgaccagggctggacgaggggagggtccgggaggcgtacaggcgcatggccgctctcaccgccaagctgattccaggcgcgtctgtgttagagagcgcgtgcgataatcccagcggggcgccgctaaactttaggggtttgaccgacccaccaggctttacgggcggaactacaaacgactgggatgacgacaacgacgtggtgttcgcggccctgaacgaaggagctatagacatgttatactgcaactacgagtttgtgagaccagagaccacgcaggaggtttactcgcagtttctgatgctcaagactatgtttgtgggtagatactccatattcatggacctgtttggtggggactttgaatcttccccctttgacacgtttgtagataatataagctataaggggtgtgagatttttgtgggcagtatgcgcgggggcgtctcttcgatcgccctccagacagacagctacacgcttatggggtacacgagcgccccggtctacccgtttgtggaggagctggcgcgcagaaagctacacgaaggaatcgcggaactctttggggccatgaacatgcctcgcatggttctgcgcgaccagcacgggttcatgtcggtgctgaacgtaaacctgagcgagtttgtggagtcggtggacgacgtggagctggacatggccaccgcggtagactatgggctgagctccaggctcgccatgactattgccagatcgcaagggctgagcttagacaaggtggccatatgctttccccgcaacaacctgagaattaacagcgtgtatgtggccatgtcacgcaccgtgtcgtcaaggtttctacggatgaacctaaacccgctgagggaacgtcacgagcgcgacactgtcataagcgagcatatattagcagccctgagggacagagacgtccagatcgtgtattgaggtcaggcacgcaagagtcgacaaccgaccgcgtgcgtggtttgcgccaatggaaacgtgtagtcctcccgttacgtttattacctatgctctgtatggaataaaaacttctcctgcttggaccctcccaaactttgaacaggttatttgtagctgcgattgggggtacagactgatcgccgtgggggcagagtctaaatgcgatgtaacaccgcagggcagcttcgtgattcagcacggcgcctcaataacggcgttagtgttggactgtggcgtagagttttgctcgtacgcgtttactcacgctgagaacactagggtccccctgaccaccgaggacgggtcggtactggtggttcccttctgcggctgggtctgcgtaggccgggacaggtgcttgcgtagcatgtccggcggggtccttactataagctgggatacgagccagacagcttacattagcgttgccgtctatcgcccgcctaccttacagtgtcacgccctagactgtacccgtgcagaaactaccgtatgttccaccgctgccataaccgacgcctccgagtcagatcccttatacgccgaccaggagggggaccagacgcaagatcaagatggaggtcacgattttttggaaactattctgatggagtctgatctctacggtaccaacggagcctcggcgttgctggagccgtgttttccctgcctttccaacaacgactgacgacggaccactcgacaagaaaacaattcctctaaccccaccctaccccatttaaaaaatgacaataaaaaagagtttatgtaaacagataacgtttatttggtttttattgattgcttggcgggttttttacatgtgcctgagcgtgtttcttctcggcctcggtcgtccctggtgcggctgtgtctgcctggctgctgtggattgggttacagattgccgcctctgagcgtggttggcctcgccgcggctgccgccgcgctgggtctgtccttcgccgcggggattgcgaacgtcaccacgcggtcgttgagacgaccgcaacgcacttcccatggccgcgttcactggcgtgtctggccgaccgattgattttcttcgctgtgctgccatggccagggccccgagcgttccagaaggcctctccgagagggccagctgtccgtcgccacccgccccggcgtgtgggtcgtaatgaggcacagagttgcgcctagacgacagagatctgtgcctgggtcgcgccgacacctccggttgctgtctggaggaagccgtgtgcgttggcgttgtagcggcggcaagcttggcggcggcccggctgttcctttctaggaacctgcgatagtcgtctgcggtcgcagcgcgtcctcgcccaaacacgtccatcctacgcaaggacggtggttggtttgtatcggatagagagaagcgcgccgcctagacacactcacttggcttgcgcgtcggcttctataacgttatccctgtggaggtacactttatccaccgcagaaaattcgtaaatgtacacgggaaccaccggatgtgtacgtccgtccgacgatcgcgtgtaatactttcttggttttcgcgcttgaattacagactggagctggtctctaatctgcttggcgtgagctctgcgacacaggacgaacatctgcaggcttttattgcttcgcatgacccgctccgaggaggggcagtgacgcttcctgcggcgcgtcgagcttgcgctggagaacgaggaggttttggtgcacgcaatggtgaatttagccagcgtcacgcgcaggtcttttctaatggtgtccgtcagctgacggcggccgagttcgtcaatggaggataccataaacatggtgtcaaagccgacatagttggcgttctctccatccggggcgagacccttgatggattccacggaaaggtcgggtacgcaaagcggggttggggtggaagtggtagtgcaagttgtgcccgtgggggctggtggccgcatttctgtaaggtggtcagctactggcccggtgaccacctctactggccacccccacccactaagcacggtcaatgcggactccatttactgtcgcggttaggaaccggtaccaacctgtgcaggtctagcttatgtagccaccgggtatgggtaggcgttgttttcaccgtaacttactcaatctgccagtctacgggctttctacctgtcttcgtgaggtacgcattggcctccaaaaagtgcgggcagtctctgaaattcacacgagacaggggcgaagggtgtccgtaggtgagcaccaggtggtgttgtctgttcggggagcaggacttctgggcgtgggcgccccacagcatgaagacgagcccttgggacgtggtacacagcctgtcgataaccgccctgaccagcctgtgccaccccagagtggcgtgtgatccaggttttccgcgtgcgaccgtcagcgtggtgttgatgagaagcactccctgttccgcccacctttccaaaaacccgtgcatgggatgccgaaacgacgggtacgatttctgaacggccgagtagatgttgcgtaagctgggaggcacgggtacccccttccggacgctaaaggctaacccgtgcgcctggcccggcgcgtggtacggatcctggcccacgataactacacgcaccttctcggggggcgaaaagcgcgtccaggcaaaaatgtcttcttttggggggaagacttcttcgctagcgcaccgcagtttgtattcgttgagaagaagtctcacgtacggctgttgcatttccctttctagaatgggacgccatgagggggctatattaaattcccgctcgacgtcttcccacgagctctggcagctggtcgtaaagagtgggtgtgtggatacgctggtgttgatgagagccaccccctgcggtagcccacagggtctccttcgtttcggtgggggagcccctgtttcacctggcgccggggagacgacacacgccgggccaatttcgcttgtgggggtagaactatttgatccgttttcctctggtgttgtctcgggtatgtttacatgagatgcctcggtctcgtgatcacaggcgctactcatctttaggtcttttgaagattggcgtagtaggaagccggtatacaactgtcctttaatccttcggctatgtccttagactttggcggcgacaaaaagaaaggcccagtaaagcagcccaggggaggcggaccgagaatctcgtctggagatgactgagattgagaaagggaatcatctaaagcgaaaagcagcttctctttaaagtcttgaggcatgtttccatttgtgacgtcttcagccaatccctgaacgactgcaaacggattaacccaaaccggttttggaggtgtgtcaacccacagaatagcttcaggggggttgcagtgtgcctttaccataattccggtcgttcggttgagcaagtttttgatgttgggagatgtaaacagttgacctttcattatcggaccgctaccgcagctggcctctaaaatacgcttgggctctcccggtccccatgtgaaatctagccttgttgctttgacgagcttggtagttactatccatgctagcatatagaccagttcgagcctagcccagcagcgcataaaccgcctcattctttcgggagtcacgaaactaagtggcggttggaattctgtacattggtttatgtacgggcttttttgccagacacacccaattaggatttgatacatcgggttgtttgcgttaatataaacacatacaagtttacgatcaggtttagtaccgactctatatgtaaagcgtgtataaaactatgttatgagggtcagaggttagatccaagcaaccctttgtttcacaattcaatagaatcataaatttaactttggcgctagcgctaacgctagggctagcgctaacgctagggctagcgctaacgctagggctagcgctaacgctagggctagcgctaacgctagggctagcaatgaggctggccaccagcaccggaagttgtcatatttgtgagcctggagcagccattttccaaaatctgtactgtcatgtttcttgacctttggatgtcatatctgtggactggaggcagccattttccaacttgtgcatatgcaacgcccaagaagctgtaatattcccaccaggaagcggtcatatgcccaggacgagcaaggctgcggggggcttcgatctagaggaggaggtcttttggcagcggaccgcggataggtaagaggtaagacctttcaatggtagatacaccattagaccgcgcggggggcagtcgtccaaggggagcttgcagtatatttaagtgggctcataaaaaatgtatgcgatcgttccgcaaagtcactttgtttttttgtttggtagaaagccattgcattagtgcggcgtgaaagtgtacccaattaacaagattggagaacaacaaactgtcgacgggacaggatatgccaaacatcaatagaagcttggatcggtgccaactgtgacgctagccaaaattcagctaagttgcatttacagttgactttgggagggggcgtagcatgaatggggcaacatttcatatttcttagtgcatgcatattatatacccccaattagcccccaattggcacatggtaatataccgccatggcgccgtgcttggtattggtggtgatgttcacataaacagccagctgggggtgttttgtttaggtgggcttttgtggtgtataggtatacacgcgctggacattagggggcgccttattaatacgatgtggaaagcccagctgcaatagcatcagtaaacagttttccattctaaaaatatctatgggattatgctatgcactgtgggtttaagattggcaaaagatctcccccatgcaaatgttttagggtaggctgtacatggaataggtaaacgcttgggggtcttctaactcggttgcattaaaggggtcaaggctttggtttggttttaaggcgattattacagcatcgtgtttcaaggcgctgtttgggaaaaggagatttctgcaggtgcagtggttcccccgggccttatatcttgcagctttagaaatctgctttctcaaacggaactgtgtaatcgtcataatgctgcagagcaattaaacccaaagatatctatttttaaagctccccctttcgcggttgcccccacccacacccctgcataggtttttgtaataggttccatatacccagggcggcgactattaacactctctcagactgatagtaaactttttaaaaaaacagctttatttaaaaatgggggtacaaaactttacaggtgtggtaaaaaagttattggtttctccggtatctttggcagttgtggggacatcgcatctcctctggttcagcgggctgtgtctgaaacgcccgttgcaggtcacggacacgctgacccccttgtctaatcaatgggctggtggacgctatgtctgggtagggcaccgggggcacactctgccgtctcggtctcagaagcacattgccgcgccgcctagcggattcatcctcagttcgtctgcgcacgtgttgtgcgaaacgcccaccaaatagccctgctccctcagagcttcggtcgactaaaacaaccgcaacagagaagggctctgttgcgcgggggccagcacccaggcgactggggcccgcggcttcgctcgtggagctgtctcgcggtgccagtgccataaacctgcgcgcaaactcccgcaggctgcatctaggccgcatgggccgctcacccgcagaactgccagatggtgcaacgggttggtcccgggggggttcttcagactcaggcgtgagttcagacaccaggcagattattgcagagtttgagcttgtatgtggggatgcgggcgccgcctcttcctcgtcggggataagcactggctgatcggtggtattcaggctgccgctaacatcggcaggttcggtgtccccatcgctgtccagagttaagtctataatttccccgttgtcccccccgttggtgcgggagttggttctgggctggcgtcttctcagcctggcgctgcgccgactagctggtcctggggcagccggccttctcccccgtctgcgccctctggtgggtggccccggtcgtgcacgtgctggtctggagtcttcttggcggggtgcctgagcagaactattgtctgtgctggtttcatcgctcgtatcttctgggtcggttaggttgttggggtcaacctctatgtcgctgtctgtttcttcctcagacgaagagctcgatgaagaggagtcaatgtattctacccctcttccgcgggctattggcaagatcggtctcgacgctacgcacagttctgcttggacgatgagatccgtgacaaagggcacagtgtcttcgtgaaacatcggccaaaactggcgagtgagctcttcctcgttacagccatgctcgcacagtgtatccataacaatgttccgcatcaccaacgctagctctggggtctcgaatagctggtcgagcctttcgaccagccagtccaccagtggctgcagtcggggagccccggcagtcccattagcgttgaggggcacaaatgccatgggtccgttccacgcagagatattggcgggagcatcgccagaatccacggccaaaaattgcccctcaaaactgtcttcgtcttcttcgctgtcatagtcaaagtccacgctcacctttgtttctttaaactcgctgtcgctctcgatggtgtgcaccacagattcgaccggcactttgcaaagtggacaggtcgggttttgtcgtatccagcgcgtaatacacacgtagcagaacgcatgtaggcatggaagcgccatagagtagttgctggggtcctccaggcagatcgggcatcgctctgcaacagttgccatggtggcagcgatttggaagagtttccaaatgaaaaggctgtatcagctgttaaaaccaggcttggtgccattcatatatctggctgcaaaactcacgtggctgtgcacgcccattcaacaccacccatatgcttaaaattagcatcttgaacgcatgccaaatttgcacgggatacggttccaatttatcgaacatctgtatctcaggggtatagcatggggacccgtttgaatgcgattggtgggcgggaaacccccgggtgagcacacggtggcgctctattctctgcgtgtgtactacgctgctttttggggttgcatagttaagggtttggccatcggtgccatttaacacaaaacggtttgccctagccccctgccctagccccctgccctagccccctgccctagccccctgccctagccccctgccctagccccctgccctagccccctgccctagccccctgccctagccctattaaactccagtttatctgctctaggggggatgccgctatttaccaccacaccccccccgattggcctattagcacacctaacctcctgagtgtgagcgcggtatagacaagctgagcatatagtggggagaaactaatggcagtagtgttactaggggtcacagactatatatcacacaaatggacacattgagtcctttctactctcctcctcggaccagcttagaaatgctataaccgtggaatagtaccagtagtaactagtttactatatttcccccattttccccctccccaaccatctccggccacggtgttgagccacttcccaccacccgcgtcccactcccttgtctttacagacccactctggctcttctgaacccagtctctctctacccgggccatatctggtcaagggtcacgggcccgcgcccgagagagagcctggcccccccagcccgcgtctcacccccgcatttgaataggggggcgtggtctaagggggggggccaaagtgacgtcacttcctgtgacgtcaccggaaggggcgtggccggaagcggaaggggaggagtcaatgacgtcaccggaaggggaggagcaggaaatgacgtaggcggtagtgacgtaggcggtagtgacgtaggcggtagtgacgtagcggaaggggaggagcaggaaggggaggagcaggaaggggaggagcaggaaggggaggagcaggaaggggaggagcaggaaggggaggagcaggaaggggaggagcaggaaggggaggagcaggaaggggaggagcaggaaggggaggagcaggaaggggaggagcaggaaggggaggagcaggaaggggaggagcaggaaggggaggagcaggaaggggaggagcaggaaggggaggagcaggaaggggaggagcaggaaccatcaacccgcccatcaacccgcccatcaacccgcccatcaacccgcccatcaacccgcccatcaacccgcccatcaacccgcccatcaacccgcccatcaacccgcccatcaacccgcccatcaacccgcccatcaacccgcccagtaaacaaagaccacgcggtcaatcaaaatttaaaaaaaactttattaaaaacaaccactcagcgataggggaaagcctggaagtgcccaccgattgggcagacatgtgagcaataaggaacgtgggctgctagatacaacgcccccttcgttcctcacatgtcgtccggggagggccttgtcttcgcgtcagcagagggcggggcggggttcagcgtcagcggatggaggcgggagtctaggcggagtctgcgttgtgctgggcggacacatagttgtggatgtactgatttttcttgttttcggccgcagggaggcgctccatcgtgttcaggagaggtacggattgcaccagtctcctccgtcctcgtcgtccgacaccacctcgatcttgatgggagcgcggcggagggcctgggccacgccggggctcgggccggggtgctcaaccaccagctccacatcgccggccccgtcgatctcgagctcgtcgtcgggctccggcaggcacagctccgtggcccccatgtgcaggaccgaggtggagcgagagccgaacccgggctcccagtcgacccgcggggctcggcggcggggagcctcggtgatgggcagcaccaggggctcggcctcggcgtcgggctccagcagcgccacccggcagaactcgctcagcagctcggggatcagaagctccgagggctccacggccccagcgccgcgccggccgcaggcgaggtacacggggcgcagccaggccccgagtccccatcggttggccgcgcggtggctctgcgcggcgccctcctcaaagtccgggtcgtggaacccgaggccctcggcctgggcccgcatgtccttgcagccgtcgtagtcgggcaggacgcgctggcggtactccctcggagccaggggaacgcgggtgcgctcgccggcgcgagtgtccaccgtgtaggccacgttggaggagcggcacagcctcaggggcgcagagtccgggtacaggcgcgcgaacgcggcctcggccctcgcgaacagtccgggcccgaagagggtgctggaggtgaggaccgcgcggctgaggtggcgctcccggggccagcgcacggcgcaggcgacccgcggagtcagggcggcccgcatgtagatgtggtactggctgatcgcgggaccgtcctggggccaatcctcggtggagaccgcgtccagcaccaggagcttgcgcctggcggagcccaggcgcaggcagaggtactcgacgcagccggtgaaggccaggtccccggtcgacagcagcaggaccccctgggcgttgagggccgagacgtccggggccccggtccagttgccggcccaggcgtgggaccgcttggtgaggatgcggttccccagggccgccagcagcgccgagagtccccccttgaggtcggaccagaggggctctcgccgagagccgccggggcgggaggccgggagtccgcccagcaggtcctcgtcctggagcggggagtagaggaccaccaccttcacgtcctcggggtcggggatctggtgcatccaggcggccctccgtctcagcgggccgctggccgccagctccccgaagcgcgcgccgtcccgggccggggggccgctgcagcgggccgcgatggtggccagggcctggggatcgaaggtgagcgccgggcgccaggcctcggggaacagctggttgtcgatgagctccgccaccagctcggggggacagtaggccgcgcaagccgcgtcgctgggccgcggagtgtggcagtctccgcggggaacgcgcctgaatccgccccgacggtcggggccctcggctggcatgggtcccagggcccggggagcctggtggcccggggtggccaccctgcgcttgggggccggagggctgtcgaccggccccgagggatcgtacccccgggcggacgaggagaaggaggccgaggctccggcctgggccgccggctccaggggctcggagcgccgcttgccgctcttgcccctggggcgcccgtggatggcacggtcgtccgaggaggagccgggcatcgcctcctggctgaggtgggccggggaggcggccgcctgaggggagcgggccttctgcggctggtgctgctgcccccgggagcgggcgtttgtctgggtggcccggcagcaggtggcggtcgtagccccggcgcctccgccgctctgggagtgctggggggactgggagtgggacgaggggaccgtcgcggactgcttcccggggacggtgggccacaggggcggcagggtctgaaggctcccctccgcggccgcggagccggagaagggctcgccgccgggcgaggacgatgagggctgctgggaccgagtcggtggggccagcagggacacggcctcccccaacatccccccgaccaggctgggtatgctgaacacggcctgggtgacggtccaggccgaggcccgggcccgggccccctcggcgttgtagcgcaccagcggcgccacggtccgggccaccaccagaacggcgcgcaccgcgaggcgcagctcgtcggagcccaggcggtgggtagggtcagagtccccgaggagcctggcccgctcgaccaggtccctgagttcgtagagggagagggccgccgtctccagcccggccgggttggagcacagcgcctcgggagggcaggcgggagaggggatctcgctggggtccagtccggggacggcggacgccccgccgcggaggcgcaggagggcctcgaagacggcctggcaggccagcacgcaggcgtccccgagctccctgagtctgaaggcggacggcctgggcgccctggaccccggagcggccgcggccgcggcagccttgcgtcggggcccgagggccgcgcagacccgggtgtacgcttcgcggacgcggaccgagggcgccggggcctcgggctgttgctggctggccgcggcagcggcggcctgggccgggtagccggccacggcggcgagtgagtccggcctccccgcctcgtctctcgggtaggccatgtccgcgtaggcgcgccggaggctctggaggatgaagctcttctgagtgcgatcgtagcggcggctcatggccaccgaggcggccgcgtgtggcagggcccagagcgcgttcccggccgccatggcgtccccgatgtggggcagggggttggccacgctcccggtgatgaaggacccgtgtccgcgcggagcgtggatgaacttctggcagaactgcgccaggttctggtcttgcccgctgagcttagagttctgcagccaggacatggcttcgcggctctcgaacaccatgcggaccagagcgttgtactgcttggtggagtcccccatctccggcacgaagaccggtactggggcctgcgcctcggcgtagcgcgaggcggccaggactatctcggggtcgtcccacagcccgtcccgcgagtccccggtccccccgtatcgcaccctccccatcggtggtggatccgacccgggccaggggtccccggacggggtgagaagcggctcgcgctggtagacgcccggggcgcacgaagccgccgccggggccgatgctgctgctgccgccgccccggtagcctgggatgagttcatgtccagcaagtcccacacggccgtctgcggggcctcctcggccggtgcctgggtctgggtctggggtatgggtctggggttggcccgcttgcgcttcgacgctcccgccagagccgatttcggacgctggtccttggggagccggtgagggctccggcccggcggagaagccatccccgcgggcggttcgggcctctccagcgtcttggccagattggcctcgcggacgccctccaggtactctaaaatgcgagcccccggagggaggaggcctcctcccgggcggctgggagcgggcgccgaagctggagccggagcgggtgcgccgggggaagcggcgccggagcggcagctcttcggggtggcggccccagcggccgggcgatcccctccggaggacggcccgggagagccggcggccgacggggtcttcgcggcgttctgcgagtgccgcgggcgaggggtctcctcctcgccgccttcgtcgctgtcgctgtcgtcggaggacgacgaagaggagctactcgccccggcaccatccgcctggtcgtcctcgtccatcgaggacgaggacgaggacgacgatgagatggagatgctccggacccggggtgccggggaccctccgcccggggaggccgaggatggaaactcgggctgcggggaccccgggcaggtctcggtatcgctgtcgagggcgaccgggtcggccgcgtccccaccgccgggtgatgaggagcccgtggcccggcgaccgttccccggggccacggaggagtggaccatcttcagcatcgcggcgagccccggagccgggctgggtgccggggacgccggctgggcggcagccgccggggtaggaggaccgccgctgccggcggccgagggcgaccgcttcgccttccctccgcggggctcgggagccggagacggcggagggatgaccaccgccggggtggagagcggagcgtcgtccaccccgaacatgttctggctgccgtacagcaggtcgggcgcggcgggctgggtgaacccctcttcggccgcgctggctgcgcggatgagggggtcctctccgaagtcgttgctctcgatgaagtcgtagaggtccggggcgaagtcgctgcgctggctggccatggcgtgctagctccggcttcggggtcgagaaccaaccgcacgagaaggctcgctcggaagaccgagaagggaaggttggcgggtggccggtggcggggttccgcggcgggcgctcggacgacgggcgccgcttctctaccctggaaaagcagaggcggaaaagatgttgagttggagcggagccgaatggtaaaagggaacgcgggcggcccgggcctctcccccgcttgggtggtaaccacgccccgtcagatatccaggcttccgcgccgagctccgccgaggcagaagccgcccgggtctgcccggggaaggtatagccttcgccggcttcgaggtaagtatccccaccgcgcttcgaccgctaggtcgaagcgggcctcggagccaccccctcgggacatcgttgttggaggggttccatggcctttttggcacttgccccgttctctaacgctctccccgggagaagaagcagatcgaagccggtcgtgtccccggggagctcttacctccgcaagccgaagaaggagtgccaagagcgggtaagctttccaagatgcgatcgatagtcctcgaaggctggctggtccagtgagctgaaaggctctctagtccgcgatgctacgatgggtaagcaacaggtgctttatactactacgatggagttttgccttccccctagtgggagtggccagcccacactatcgattgtgattggccgttgatgatgggcggtgggcgtgtagcggctctagcctatggggcccggtcccgcgctttgcatttgcatgcgcttttcgcctcccccccgctccaaccaattagaacccgtgtgtcgtttctaatttgcgtatgtctcctcccagggaagcgcgtcgcgccaacgggatgccgaatagcgcctctcatatgcataaaggtgaacgcccctggacgccatgacacctcgatgcacatctcatctgcatgcgtctcctccccgggaagcgcgtcgcgccaacggggttcgtgatcgcgccgctcatatgcataaagacgaacgcccctggacgccatgacacttcctggtaaatctcatctgcatactgacgagcttgggaggagccgagggagtgggcttcaaaagtaatttcaataaaaatggcgagtgcgatatttccgaccgaaacggaaatgatgtaaaaaaagtgggagggggagggggaaaggtgggcgtgaacgcgtctctgtatttcccggttgaatctcattaaagttataccaattaaaacatgtatcgctatcgcgtgtattttgggcgggatgatatctacgtgtgctgatttacatattatctcacaaggagccaggcggtggcgctgtttcaaaacacggttttacatgcgccttcatacacgtccgcacgagggcgccctcgtgtgttaaccctcacagatgcggttactacatctaaccgcttcgtggcgccatgtagtccattaacatgtgacgccacgatgtgacgctatacacacacgcgccggccccaccccatcgacgtaacacggcgcccctcccaatattcaaatgacatgagggggcgtggcttgagacagctgtgtggggggagatgcccggtacccaccttccacccacgtccacaccccccccatgccccgcccacggtttttttgagagccgaccgcacacacgcacaatcgttgtaccgtgtaaacggtttcgatccgttacattttcccacgggtaccgggtcatacataaaatacctaaagcgcccccatccatacactccgggagatacacatcgatgtttcactttttatcgttacacactaccccccgttatcgattttttttgccacgcgtgtacagaggtgcccctccccccagtatggataaggggggggtgtcaataaaatttttgcgcgatgaaacctaggggagggtgcacggttattgagggtggggggggcaaaaatttttgagcgcaacagatagcatggctgggttacggtatgcggctatgggggggggggggcgctaaaatacggttacccggcacatactctcgtcgaggtatgggccgggtcacggtacccactagttggcacggtgccatgcgcgctcccgagatgggggtgggggcgtggaacggataagaagtgcgaacacgtagtgttcgcactttgttgcaataattattattataacttattggtgattggtgcgaacgggcctctgggccaatcagggtgcaggatttgtgccacgggacgcgtttccaattttcgtccgataatcgataatctgtcgattgcaaaggcgtggtgatgtaccggtatccgcctccctaagggcggagaatatggaactcgtgtatatattaccctgcggatcaccaggtgtgggtacacacgcagcttgaagcttagagccttttaacgtgcatccacaccacggaaaacagggcaaggtaagtggtatcgcgagtgggtctgcccatgagatcggtggtggtcggtggtcggtggtcggtggtcggtggtcggtggtcggtggtcggtggtcggtggtcggtggtcggcccatgggggagggcccactaattgatgggtgtggttataatgtttttccattcgttatctccagcaaccccagctccggcgaccccggcccagcccagctccggcgaccccggcccagcccagctccggcgaccccggcccagcccagctccggcgaccccggcccagcccagctccggcgaccccggcccagccatgccccacggacagccgtgcggggcgtgcgacggatcctgccgcatggcccagcgggggacgccgtccaccagccccctcatcccgtccctgaccccctcgcccccggcgggggacccgtccccacgctccagccagcgcatcgacgccgtgcgcgtgcccgcgaggctccccggcggctcggaccatccggaatacggaatgccgctatccccgcgggccctgcgcccgtacctggcccgggggccaggggcgttctgcgccccgccgtggcgccccgatgtgaaccgcctcgcgggggacgtcaaccgcttgttcagggggatatccacctcctcgatccacgtgaccgaggactcgcgcaccctgcgcagggcgctgctggatttttacgccatggggtacacgcacacgcgccccacactcgagtgctggcagtccctcctgcagctgctgcccgagcagagcttcccgctgcgcgccacgctgcgggcactgaactccgaggaccggtacgagcagcggttcctggagccgccgagcgaccccccgaataccctctttggggaggagtgtgacgtgagcggcgacgagtcgccctccgaggaggaggaagaagacgaggccagcggggagagcagcgtttcggagtttagccccgaggaggagactgccagcagcgagtacgatagcttttcggacgtgggggaggacgactcgagctgcactggaaagtggtctagcagcgaaagcgaaagcgatagcgagtccgatgcccccaccaacaaccaccaccctacaacccgcgctagcgctgccaaaaagcgccgcaagcgccaaccccccaagggtgagcgtcccaccaaaagcgctcgccggtgagtcggataggtgtacgcatgcacgctttccaaaacacaccaacgctacgttctaaccagtaaaaccaccactcgttgtcaccccgatgaaccgcaaccccaatacacaccttttgacctctccctccacacctccaaaacccactcgccaacccacccataccacccaaaacgagtaaccaataaaaacatcgttgacggcactctctgtagtttggcttcgtttatatggttgttttttcccctcttgcttggctgggatgaatagttgggtgctccgagccccggctgggggagcggtagcgaaaaaacggttgttgttgtttagcgttgctcatccacgcgactcggggcgaggtcgggggaaagcgtgaatgacagcgccatcacacccaatccccgacggctattggagagataacaacacccacgcagagggagggagagctatgggaagggtggggtgggggggggaggaggaacatctatagctacctaaaccacgccagcaggcgtgtgtgtgttcccgcgattccacgccccgccgaggaaatacagctcgcggagggccgcgcgcaatcagtgcgcccgatctcccggccactgaaccacaacggcatggacggcgcgtacggccacgtccacaacggctccccgatggccgtcgacggcgaggagtccggagcggggacggggacgggggcgggcgcggacgggctatacccgaccagcacggacaccgcggcgcacgcggtctcgctgccgcgctccgtgggggactttgccgcggtcgtgcgcgccgtgtcggcggaggcagcggacgcgctccggagcggcgccgggccgcccgcggaggcctggccgcgcgtgtaccgcatgttctgcgacatgtttggtcgctacgcggccagccccatgcccgtcttccactcggcggacccgctgcgccgcgccgtggggcggtacctcgtggatctcggcgcggcgccggtggagacccacgccgagctcagcggccgcatgctcttctgcgcgtactggtgctgcctgggacacgcgttcgcctgctcgcgcccgcagatgtacgagcgcgcgtgcgcgcggtttttcgagacccggctcgggatcggggagacgccgccggcggacgcagagcgctactgggccgcgctactcaacatggcgggcgccgagcccgagctgttcccccgccacgcagccgccgcggcgtacctgcgcgcccgcggccgcaagctccctctccagctgccctcggcccatcggaccgccaaaacggtggccgtgaccggccaatcgataaacttttgaaaaatatactcactatatactaaaccccaattccgcgagtctgcccctgtttgtgtttccgtctctctatccatttcccccaccaatacctcaactatcgagcgggcgtggggacccggggagagaccaccaggcctcgccggttttctctctctccgttggggggggggatggtagggattggtgggtgaggtggttgtggtagtcattgtgagtaaaccaacgcagactgctactgggcaaaaaaacaaagggggaggccgagcgggggagagcggtaggggaggccgagcgggggagagcggtaggggaggccgagcgggggagagcggtaggggaggccgagcgggggagagcggtaggggaaacgccgcctgggatgagtgggaccgagtagtgtgtgataggcactagagggcgccagcgtacaggggagtgtacccaccaaaactccaacaccacggaaaatatggtttacgtttttttattaaaaaagctgaaacgctcaataccacagacttttcagagatacagattatttacaccgttccaacttcggcctcaaacggccacgggggtgtcttcggggttttctgcaaacacgtgcgcgcggctgcggggctgcctggcccctctggggtgggggtcaggggagctctggagatccagccgcatgaagctggtatttacttcctggaaggcgtcttcagtgacgtgcaactggtactcgaatcccagcttcatcacgtagcgctccgatgggataggaatcctcttcggcccctgccaatttgtgatcccctcggcgatggcggggggaaccttggcgaatgcttcttccgggagagtgctggggtccgcgctgctggcatcggcggcgtcggcccttatgtaatagcgctcgtccgcgggttcctcctcgccctcgtagtacacctccgggtagaggaacggcaggcggacgaaggttccgtcgttcagctgcttgtagaacctcttctcgatcttgggcagcggcagggcggagtagctgagcacctctccggccaccaccccctcgaccggcacgcggcacggcacctcgctgggtgcgacggggaagtagcccgtggggaccttggcgaagtacccctcgttcatctcttcgcgacaccgcctgaagtaggagcgcccgagcatgcacccgaacgggttgaacaggtgcttacgctcgcctctcggcgcctcctcgccgctggagttggcggcccccccggccgcggctgcggcgaaggtgggggccaagacgaggtggggcgggttggcattgcggcggcgagcgagcgcgcagcggaagacctcggtgccggcggtggcggctgtcatcatgtcggagttcatcacgtctgttatcttcaaaggtgtcttctctctttttcccttcaaaatggaggggatgttgtgcagggctaggcggtggtgggtgtaaaggcgaggcttttgcaaggcaagaaaccactgctcaacccacaaagcgaggtgaggtactggcgagagtcccctaccttttaacgtgtggatgtccggccgaacactccccagagtaggcgttccatccacgtcacgtctcccgcccggcgggcggcgggcgcccgcgggtccccggggcggggcggcgtcgcggcggcggccgtggaccgagcgggcgcgggagcgcgcgagcgccacctcggggcgcgcatccccccctccgacggccgccgccgcggcagcggccgccccggggcgggaatttcccgaaggcgcgcggggtcgaccaccgcgtaaatcacccgcttaactgtgggtggatgaactaatgaattcgagctatgtttggaaaacccacactcacccactacggtgtcttctccacccgccgctcttaatttgagcggatgattatgctcaacggtggtccatggtattgtctcaaacagttttccacacacgaagggaggctgccaagatttatgaaactcatctgctatctctgcgtataccattcgtttaggaccgggtatcaggtcaaacaccggcttgcacaagtctgctgcccccagcacccagaggtgatagggctgattaatgataaggctggagttaagatggttatagccagagagtacagagagccactctatgctcacacccattctatcttcgtggtaaaccaccccgtttctatctagagctatagctgtagcccccctggttctgactattggcctacacgcctttggtagggtcaataaactcgatgaaaatctgtagagatcggcggagcgtaccactatgggtattccaagcggttcagatgccaatacgaaacattgtcggctcaaaaactcccacagatgtccatcgacgtcgatggaactgtttggcaatgctttgtgtctgtcgacaactgtaacaactgtaattaagaccacacccatgttattaacaaatgggtgggttgaaccaactccataaatttcagcagagctgctctagatacacactctgttgtgaaaaagactcgccgtgcgccaagccctatagctttataggcacacgcccacggcatcggaatggaaaataaacaatgcgaccacctaaccgactggttttccactacgagcgacgcgtcagaatcgatggacaccacgcctccgctaccacctcccacaccctcggtggatcccagctacagcggtgcggccgcggacgaggacctgtactctgacataagcgagggcgatctagaatacagcgactgcgatagcgcctctgaaagcgatgaggatgacgacgattgtcttataccatccaaagagaaagctagggaagtggctgcttcgtttgggtacacggtcatcaaaacgcttacgcctggttcggagggacgtgtgatggtggcaaccaaagatggccagccggaaccggtcgtgttgaagattggtcaaaagggaactactctcatcgaagccatgatgctgaggaatgtgaaccatccctccgtgatacaaatgaaggacaccttggtatcgggggcgataacgtgcatggtcctgcctcattacagctcggatctgtacacctttctgactaaggaatcaaggcgcattcccattgatcaggctttgattatagaaaaacagattctcgaggggctgcggtacctgcacgcacagaggatcatccacagagacgtcaagactgaaaatattttcataaacagcgttgatcaagtatgtatagctgactttggggccgcccaatttcccgttgtggaacccgcggacctgggcctggctggtaccgtcgagaccaacgccccggaagttttggccagagcaaaatacaactccaaggcagacatatggagcgccggcatcgtcttgtttgagatgctcgcctatccatcaactctattcgaagaccctccgagtaccccagaggagtatgtgaaaagctgccactcgcaactactgaagataatttcaacgctcaagataaatccggaggagtttcctcgagaccccgggtcgaggctcgtgcgcggatacatcgagtattctagactcgagcgcaagccctacacgcgctacccctgctttcaacgcgtcaacctgcacattgacggggagtttctggttcacaagatgctagcgttcaatgccgcgatgcgcccatcggccgaggagctgctgtcatacccaatgtttgcacaactttaggatgactaacctgtttctgggaggagacagcgtgggcgacggtgtataaagttggtctgctttcaagccctgccactgcgctacagtgccaccaactgtaaagcggtagtaagctgcagtgatgttgactgtcttagcagccctgagtctgctcagcttgcttacgagcgcaaccggacggctcgccccagatgaactctgttatgccgaaccccgcagaactggcagcccaccaaacacccagcccgaacgcccacccgtaatatttgagcccccaacaattgcgattaaagctgaatccaagggttgtgagctaattttattagatccacccatagatgtaagctatcgcagagaagataaggtgaatgcgtccattgcttggttttttgactttggcgcttgccggatgcccatcgcatacagagagtattacggttgtattggcaatgctgttccctccccagagacttgtgatgcgtactcatttacccttattaggaccgagggtatcgtggagtttaccattgtaaacatgagcctcctgtttcagcctggaatatacgatagtggcaattttatctacagcgttctcctggactaccacatatttacaggacgtgtaacgttggaagtggaaaaggacacaaactatccctgtggcatgattcatggactcactgcttacggaaacatcaacgtagatgaaaccatggacaacgccagcccacacccgcgtgccgtggggtgctttcccgagcccatcgacaacgaagcgtgggcaaacgttacatttactgaattggggataccagacccaaactcatttctcgatgacgagggtgattacccgaatatatcagactgtcactcgtgggagtcatacacctacccaaatacgctgaggcaggccacaggaccccagaccctgttggtgggtgcggttggactcagaatcttggcgcaggcatggaagtttgtcggtgacgaaacatacgacaccatccgcgcagaagcaaagaatttagagacccacgtaccctcaagtgctgcagagtcgtctctagaaaaccaatcgacacaggaggagtctaacagccccgaagttgcccacctgcgaagcgtcaacagcgatgacagtacacacacggggggtgcgtcgaacggcatccaggactgtgacagtcagctcaaaactgtgtatgcctgcttggctctaattggactcggcacatgtgccatgatagggttgatagtttacatttgtgtattaaggtcaaaactgtcctctcggaatttttcgcgcgcgcaaaatgtaaaacatagaaattaccagcgacttgagtacgttgcttaacacctgtcaaataaaagtttcaaatcaaaaacattgttgtctgtaataactgagtgtggttttaaaaatactaaatcgcggcaattccggaaatagccccatacaaaagggagggttgttggtgtttagaaaatagtttccccgttgatgagtttcgcgtagaggtctaactcatccgcgatggggttcatctatgcgcgcaaactgttgctgtgcatggctgttagtatatacgccatagggtccactacaacaactgagactaccacctctagctcgtccacgtctgggagtggccagtctacatccagtgggaccactaatagtagcagttctcccaccacgagtccacctaccacatcttcatctccccccacatcaacccacacatcctccccatcttcaacctctacccaatcgtcgtcaacggcggcgacaagctcgtctgcaccctctacagcgtccagcacaacctctattccaacatccacatcaacagaaaccaccacaacaaccccaaccgcatctacaacgaccccaacaacaacgaccgcggctcccacaacggccgctacaaccacagctgttactacagccgcgtctacatcagcggaaaccaccacagctactgcgactgctacctcaaccccaaccacaactacgcctacgtccacaacaactactacagctaccaccactgttccaacaaccgcttctacaacaactgatacgaccacagcagcaacgaccacggcagcaacgaccacggcagcaacgaccacggcagcaacgaccacggcagcaacgaccacagcagcaacgaccacagcagcaacgaccacagcagcaacgaccacagcagcaacgaccacagcagcaacgaccaccgcggctactacttcctctgcaaccaccgcggctactacttcctctaccaccaccgcggctaccaccactgcggctaccaccaccgcggctaccaccaccgcggctaccaccaccgcggctaccaccaccgcggctaccaccaccgcggctaccaccaccgcggctaccaccaccgcggctaccaccaccgcggctaccaccaccgcggctaccaccaccgcggctaccaccaccgcggctaccaccaccgcggctaccaccaccgcggctaccacaacggggtctccaacctctggttcaacatctactacaggggcttccacgtccaccccctcagcttccactgccacatctgccactcccacatcgacgtcaacatcagctgcggctactacatctacccctaccccaacttcagctgcaacatcagcagagtctaccacagaggctccaacatccacacccactactgatacgaccaccccttcggaggcaaccacagctactacatcaccggagtctaccacagtttcagcctcgactacctctgctacgaccacggcattcacaaccgagtcccacacatcgccggattcgtctactgggtctacatccacagccgaacccagctcaacgtttactttaacaccttctactgcgaccccctccacggatcagttcacagggtcatctgcctcaacagagtctgactcgaccgactcttccaccgtgcccacgactgggactgaatctataacagaaagctcatcgaccaccgaggcgtcaactaacttgggatcgtcaacctacgagagtaccgaagccttggaaactccagacgggaatacaacttccggaaataccaccccatcaccttccccgcgtaccccaagctttgctgatacccaacagaccccagacaatggtgtatcaacccaacataccaccatcaatgaccacaccaccgccaacgctcaaaaacacgcagggcaccacagaggtcgcgcagggggtcgtcggggtagccctcagggggggtcacacacaacaccacacccagaccgtttgactccttctccagacgacacctatgacgatgatacaaatcaccctaacggtaggaacaattcaatagagatcgtgcctcagctcccgccagaccgacccatcatagagctgggggtggcgactctcagaaaaaactttatggaggcgtcctgtactgtggagactaactcaggcttggcgattttttggaaaatcggcaacgcaagcgtagacgcgtttaatcggggaactactcacactcggctgatgcgcaatggggtaccggtttacgccctcgtatctacgcttagagttccgtggttaaatgttattccactaacaaaaattacttgcgctgcttgccccacgaatctagtcgccggcgatggggtggacctcaactcatgtaccaccaaatcaaccacaataccgtgtccgggccaacagcgcacccatatttttttctctgcgaaaggggacagggctgtgtgtatcacatcagaactggtgtcccagcccacaataacttggtcagttggatcagataggttgcgtaacgatggattttctcagacgtggtatggaatacagcccggggtgtgtggtatactgcgcagcgaggttcgcattcaccgcaccacctggcgctttggatcaacatcaaaggactatctctgtgaggtcagcgcatcggactcaaagacgagcgattacaaagtgctacccaacgcccactcaacttccaacttcgctttagtggctgcgaccacgctaacagtgacaattttatgcctgctgtgctgcttgtactgtatgttaacccgcccccgagcgtctgtatattaactcaaaaattatcccttggcctttacaaccagtggtggcgtgtatgcagaagcgtgccaccgccctggtacgtgtttttcaataaacgaagcatgtctaccttcaagcttatgatggatggacgtttggtttttgccatggcaatcgcgatcttgagcgttgtgctctcttgtggaacatgcgagaaagccaagcgtgcggttcgaggacgccaggataggccaaaggagtttccaccaccccgctataactatacaattttaacaagatacaacgcgactgcgctagcatcaccgtttattaacgaccaagtaaaaaatgttgacttgcggattgttactgctacgcgcccatgtgaaatgatagcgctgatcgctaagacaaacatagactcaatcctgaaggagctggccgctgcccaaaaaacttattccgccagactcacctggtttaaaattatgccaacgtgtgcaacgcctatacacgatgttagttatatgaaatgcaacccgaagctatcatttgcaatgtgtgatgagagatcagacatactatggcaagctagtttaattactatggctgctgaaactgacgatgaacttggacttgtactggcagcccctgcacattctgcctcgggactgtatcgccgtgttatagaaatcgacggaaggcgaatttacacggacttttctgtaactattcccagtgaacggtgtccgattgcctttgagcaaaactttggcaatccggatcggtgtaaaactccagagcagtactcgcggggagaagtttttacacgtcggtttcttggtgaattcaacttcccacaaggagagcatatgacatggttgaagttctggttcgtctacgatggtggaaacctaccagtgcagttttatgaagcccaggcattcgcaagacccgtgcctccggataaccaccctggatttgattctgttgagtcggagattacacaaaataaaacagacccgaaaccaggccaggcggaccccaaacccaatcagccttttaagtggcccagcatcaaacacttggccccaagactcgatgaggtggatgaggtcatagagcccgtaacaaagcccccaaaaacgtctaagagcaactctacgtttgtgggcatcagcgtcggtttgggtatcgccggcctagtattggtgggcgtcattctatacgtctgcttgcgtcggaagaaggaactgaaaaagtctgcacagaacggcttgactcgcctacgctcgacctttaaggatgttaaatatacccagcttccgtaaacagtgttgcgtaacctgctgggaggtgtccacggccttaaagcttcgcggtttggagatataacgcacaacctacaacaaacgcgacacagcaagtagtagtcgctatggccaaactcactgggatgttcagcgctgcgatattactgtctatggctatatgctcaaccgcaatcatatatcgcggagaacatatgagcatgtacctaaacgccagctctgagtttgccgtgtaccccactgatcagtcccttgttttggttggccacttgctctttctcgacggacaacgcttacccaccaccaactatagtgggctgatcgaattgattcattacaactactccagcgtttgctacactgttatccaaacgatatcgtatgaatcatgcccgcgtgtagccaacaatgctttcagatcgtgcctccacaaaacttctaagcactaccacgactatttccgagtcaatgtctctgttgaaaccaacgttctcttaaacatcacaaagccacagcctacagattccggggcgtatatccttcgcgtaaaacttgaccacgcgccaaccgcagatgtttttggagtttccgcctttgtttacgatctaaaatctaaaacggtccccgatccaatgcccaccacacaaacggtagaacctacaacgagctatgtgtcgactcccacatacgactataccgatgacgtaaccaccgaaactgaatccacatcaacatctacccaacaggcgatgacctccactcaaacccctagcgctacatggggaacccagctaaccacagagctgccgacaaacgaaactgtggttattggtcaggaggccctgttatgccattggttccagccatcgacaagggtgccgaccctgtatctgcatctgttgggacgcactggcaatctcccggaagatgttctactggtcgaagactctgagtttcttcgtaccacatcgcctgcacataggccttctgcatcacccgctgacggtgatgattttaaacagacaaactcaacttcccttaaggcgcgcaacaagatcgtcgcaatggtggttatcccgaccgcgtgtgtactaatgctcctgttggtggttgtcggtgccatcataaacggtgccgtgcgcaaacatttattgagttgcgcaagccgcaggatctaccgctccggacaggggggcgcatcggcggccgaacggagacggctgacttgcggtcctactttagccgcgtcatcggagtcgctggccgacgatacaacgtcatcacctccaacccccaaaccttcgaagaaaaccaagttggagaccgatccgcttatggaacagctgaaccggaaactggaggccatcaaagaagaatcatagttgtgggggtagatggggttggtattaaagtttgtgtattatcgattttatatttattaaaatttgtgaaacataaacatcttgtgcaatgtttacattatttgtgattgggacggtccactgggaggtggtacaactcgggtttaaagctctggatgtttggtaggaaactcacagttctccactttggcgtcaaagcaatcagacgtctaattcgaagtagaacgtcacaatggagctgttggccgcaagtcgcgcttgtatattttttgggctagtaacagtactcgatgcgtggggagtccaacaagttgaactttccgagggggcttgggctatgatcgacggaagggacgttttaacccctactaacacaactactcgggtcacaaaggcctggacgtttttggaaacccctcccggttgcgctggcgacatatcagttaagaaggtgtgcgtgagccatagtctgtgcgaagataacattataataggaaagcactgtaacctcttaactggggaacatggcattgcgttggccgagtttaacgtagtaaacggatcgctgcgcagaacagacgatgtgtactttgtgaatggtacagtctttccaatccttgccgaaacccgcagcgtcctacaaatccatagggcaaccccctctatcgcaggggtttacaccctccacgtttccatcgacggaatgatgaaacactccgtcgtgctgctcaccgtcaagaagccgcccaaacaaccgcaaccacgcttgcgcgttaagaccccgccacccgtaaccgttcctcaggttcccgtaaagacccacacggattttgtggtgcacggataccactcgcgcgtgtacgctgatggcgaatctttcgagctgtcggtgaacctggagtcacatatcgtagagcccagcttcagcgcggagattcagtggtactatatgaatacatcatcgtcatcatgcgatctatttcgagttttcgaaacctgcatctttcacccgacagccatggcctgcctgcacccggaacaacacacctgcagcttcacatcccccatcagagcgaccaagatcctacaccgggtgtatggaaactgcagcgatcatggaaattcgtggccttctaggtgccatagcactctgctgggcaatcgtctatactttattcaaccagcacagaacagagtggacctgttgttcaaagacactcccgcgtcggctaccgggctgtatgtgtttgtattattgtacaacggacatccggaggcgtggacgtatacgctgctgtcaaccgcaaatcactttatgaatgtgcttactgacgtgacccgcccacggctaggagagcacttttatacggacctcgggcacaaaatcatcactcctcatccatctgtagctaccactgaagagttgggagcttggactcgacactacctcgcctttttgctggttattatctgcacgtgcgcggcgctgctagttgcattggtggtgtggggctgtattctctacatccgaagcaaccgtaagccgtatgaagtgctgaacccctttgaaacggtttacacgagcgttccaagcaacgacccctcggacgaggtcttggtgtttgagcgcctagcttcggactctgacgactccttcgactctgattcagacgaagagttggaatacccaccacctcccaaaccagctccacagctcccaccataccagtttgtagacgggggagacgcccctagcggcaggtccggattcaaggtttggttccgcgatacacccgaggcgtccccggttcctcttcataaaccaacgctacagggtccagactacagccgggtagcgtcgaagctaaagtcgatactaaaatgagcagcaacagcgataacacagagtgcttcgggggagtcaactatgccgagggaatgcgcaagcgtaaacgcaaccctgtcagaaacagcacctttcaagagtatctcgacgcgcgtaacgcgcgttatcccagatccggctcaacctccgattccgacgaggactacacaaccagatcaaagtacgagtcagatgtcagcgagtttaaaaaaatgatggatctggaaactctacctcccccaaaggctgagccgcaagctcagaaggccgagcctgatgctgcgaaggaggagccagtcagcaccactagctacatcttaaacgaatgggtggctcctatgattgggcattttctggcaatgtgtatgtatgagttgcttttcaaataaaaacaaacattaacccctgtaaacatccgtttgtctactgtgtatgatagagttaaacccaaccctagagagttatgtatttaatcccctgggaccccgcggaagtcatatatccctcggccccctcatttgggcgcacattgcctgcccggcggcagtcttactcccttagctcgccctcttgcataagataaactattcccctcccagctagtttcacccaccagattaagcgaggttttccctctcagcgatcacttttcaccaccgaagaacaggccctcatcggtttccctccgtgttttcccatccatctatccaaccactacattttcatggagaaggcggaggctgccgcagttgttatacccctgtcagtttccaaccccagctaccgtggaagcggtatgtccgaccaagaagtaagcgaagaacaatctgctggagatgcctgggtgtctgcagcaatggcagccgcagaggcggtggctgctgccgctacctccaccggaattgataacactaacgactacacgtacaccgctgcttctgagaatggggatcctggtttcacactaggcgataacacctacggaccgaacggtgctgcctcagggtgcccgtctcccccatcaccggaggtagtgggtctagagatggtggttgtgtcgtcgctcgctcctgagatcgcggcagccgtaccagcagacacgatttctgctagcgcagcagccccggcaacccgcgtagacgacggtaacgctccgctgctcggaccggggcaagcgcaggactacgactcagagtcaggatgttattacagcgagagcgacaatgaaacggccagcatgttcatacggcgagtcggacgtcgacaggcccgcaggcacaggcggcggcgcgtggcgcttactgtcgcaggcgtgatcctggttgttgtcctatgcgcgatttccggcatcgttggggcgttcttggcacgcgtgtttccgtaacaccaccttttaccccacaacagcccctcgcccccctggtcgaccagctaccggacgtctcccaagcctcatccacccacagttaagcgggtgatttacgcggtggtcgaccccgcgcgccttcgggaaattcccgccccggggcggccgctgccgcggcggcggccgtcggagggggggatgcgcgccccgaggtggcgctcgcgcgctcccgcgcccgctcggtccacggccgccgccgcgacgccgccccgccccggggacccgcgggcgcccgccgcccgccgggcgggagacgtgacgtggatggaacgcctactctggggagtgttcggccggacatccacacgttaaaaggtaggggactctcgccagtacctcacctcgctttgtgggttgagcagtggtttcttgccttgcaaaagcctcgcctttacacccaccaccgcctagccctgcacaacatcccctccattttgaagggaaaaagagagaagacacctttgaagataacagacgtgatgaactccgacatgatgacagccgccaccgccggcaccgaggtcttccgctgcgcgctcgctcgccgccgcaatgccaacccgccccacctcgtcttggcccccaccttcgccgcagccgcggccgggggggccgccaactccagcggcgaggaggcgccgagaggcgagcgtaagcacctgttcaacccgttcgggtgcatgctcgggcgctcctacttcaggcggtgtcgcgaagagatgaacgaggggtacttcgccaaggtccccacgggctacttccccgtcgcacccagcgaggtgccgtgccgcgtgccggtcgagggggtggtggccggagaggtgctcagctactccgccctgccgctgcccaagatcgagaagaggttctacaagcagctgaacgacggaaccttcgtccgcctgccgttcctctacccggaggtgtactacgagggcgaggaggaacccgcggacgagcgctattacataagggccgacgccgccgatgccagcagcgcggaccccagcactctcccggaagaagcattcgccaaggttccccccgccatcgccgaggggatcacaaattggcaggggccgaagaggattcctatcccatcggagcgctacgtgatgaagctgggattcgagtaccagttgcacgtcactgaagacgccttccaggaagtaaataccagcttcatgcggctggatctccagagctcccctgacccccaccccagaggggccaggcagccccgcagccgcgcgcacgtgtttgcagaaaaccccgaagacacccccgtggccgtttgaggccgaagttggaacggtgtaaataatctgtatctctgaaaagtctgtggtattgagcgtttcagcttttttaataaaaaaacgtaaaccatattttccgtggtgttggagttttggtgggtacactcccctgtacgctggcgccctctagtgcctatcacacactactcggtcccactcatcccaggcggcgtttcccctaccgctctcccccgctcggcctcccctaccgctctcccccgctcggcctcccctaccgctctcccccgctcggcctcccctaccgctctcccccgctcggcctccccctttgtttttttgcccagtagcagtctgcgttggtttactcacaatgactaccacaaccacctcacccaccaatccctaccatccccccccccaacggagagagagaaaaccggcgaggcctggtggtctctccccgggtccccacgcccgctcgatagttgaggtattggtgggggaaatggatagagagacggaaacacaaacaggggcagactcgcggaattggggtttagtatatagtgagtatatttttcaaaagtttatcgattggccggtcacggccaccgttttggcggtccgatgggccgagggcagctggagagggagcttgcggccgcgggcgcgcaggtacgccgcggcggctgcgtggcgggggaacagctcgggctcggcgcccgccatgttgagtagcgcggcccagtagcgctctgcgtccgccggcggcgtctccccgatcccgagccgggtctcgaaaaaccgcgcgcacgcgcgctcgtacatctgcgggcgcgagcaggcgaacgcgtgtcccaggcagcaccagtacgcgcagaagagcatgcggccgctgagctcggcgtgggtctccaccggcgccgcgccgagatccacgaggtaccgccccacggcgcggcgcagcgggtccgccgagtggaagacgggcatggggctggccgcgtagcgaccaaacatgtcgcagaacatgcggtacacgcgcggccaggcctccgcgggcggcccggcgccgctccggagcgcgtccgctgcctccgccgacacggcgcgcacgaccgcggcaaagtcccccacggagcgcggcagcgagaccgcgtgcgccgcggtgtccgtgctggtcgggtatagcccgtccgcgcccgcccccgtccccgtccccgctccggactcctcgccgtcgacggccatcggggagccgttgtggacgtggccgtacgcgccgtccatgccgttgtggttcagtggccgggagatcgggcgcactgattgcgcgcggccctccgcgagctgtatttcctcggcggggcgtggaatcgcgggaacacacacacgcctgctggcgtggtttaggtagctatagatgttcctcctcccccccccaccccacccttcccatagctctccctccctctgcgtgggtgttgttatctctccaatagccgtcggggattgggtgtgatggcgctgtcattcacgctttcccccgacctcgccccgagtcgcgtggatgagcaacgctaaacaacaacaaccgttttttcgctaccgctcccccagccggggctcggagcacccaactattcatcccagccaagcaagaggggaaaaaacaaccatataaacgaagccaaactacagagagtgccgtcaacgatgtttttattggttactcgttttgggtggtatgggtgggttggcgagtgggttttggaggtgtggagggagaggtcaaaaggtgtgtattggggttgcggttcatcggggtgacaacgagtggtggttttactggttagaacgtagcgttggtgtgttttggaaagcgtgcatgcgtacacctatccgactcaccggcgagcgcttttggtgggacgctcacccttggggggttggcgcttgcggcgctttttggcagcgctagcgcgggttgtagggtggtggttgttggtgggggcatcggactcgctatcgctttcgctttcgctgctagaccactttccagtgcagctcgagtcgtcctcccccacgtccgaaaagctatcgtactcgctgctggcagtctcctcctcggggctaaactccgaaacgctgctctccccgctggcctcgtcttcttcctcctcctcggagggcgactcgtcgccgctcacgtcacactcctccccaaagagggtattcggggggtcgctcggcggctccaggaaccgctgctcgtaccggtcctcggagttcagtgcccgcagcgtggcgcgcagcgggaagctctgctcgggcagcagctgcaggagggactgccagcactcgagtgtggggcgcgtgtgcgtgtaccccatggcgtaaaaatccagcagcgccctgcgcagggtgcgcgagtcctcggtcacgtggatcgaggaggtggatatccccctgaacaagcggttgacgtcccccgcgaggcggttcacatcggggcgccacggcggggcgcagaacgcccctggcccccgggccaggtacgggcgcagggcccgcggggatagcggcattccgtattccggatggtccgagccgccggggagcctcgcgggcacgcgcacggcgtcgatgcgctggctggagcgtggggacgggtcccccgccgggggcgagggggtcagggacgggatgagggggctggtggacggcgtcccccgctgggccatgcggcaggatccgtcgcacgccccgcacggctgtccgtggggcatggctgggccggggtcgccggagctgggctgggccggggtcgccggagctgggctgggccggggtcgccggagctgggctgggccggggtcgccggagctgggctgggccggggtcgccggagctggggttgctggagataacgaatggaaaaacattataaccacacccatcaattagtgggccctcccccatgggccgaccaccgaccaccgaccaccgaccaccgaccaccgaccaccgaccaccgaccaccgaccaccgaccaccaccgatctcatgggcagacccactcgcgataccacttaccttgccctgttttccgtggtgtggatgcacgttaaaaggctctaagcttcaagctgcgtgtgtacccacacctggtgatccgcagggtaatatatacacgagttccatattctccgcccttagggaggcggataccggtacatcaccacgcctttgcaatcgacagattatcgattatcggacgaaaattggaaacgcgtcccgtggcacaaatcctgcaccctgattggcccagaggcccgttcgcaccaatcaccaataagttataataataattattgcaacaaagtgcgaacactacgtgttcgcacttcttatccgttccacgcccccacccccatctcgggagcgcgcatggcaccgtgccaactagtgggtaccgtgacccggcccatacctcgacgagagtatgtgccgggtaaccgtattttagcgcccccccccccccatagccgcataccgtaacccagccatgctatctgttgcgctcaaaaatttttgccccccccaccctcaataaccgtgcaccctcccctaggtttcatcgcgcaaaaattttattgacaccccccccttatccatactggggggaggggcacctctgtacacgcgtggcaaaaaaaatcgataacggggggtagtgtgtaacgataaaaagtgaaacatcgatgtgtatctcccggagtgtatggatgggggcgctttaggtattttatgtatgacccggtacccgtgggaaaatgtaacggatcgaaaccgtttacacggtacaacgattgtgcgtgtgtgcggtcggctctcaaaaaaaccgtgggcggggcatggggggggtgtggacgtgggtggaaggtgggtaccgggcatctccccccacacagctgtctcaagccacgccccctcatgtcatttgaatattgggaggggcgccgtgttacgtcgatggggtggggccggcgcgtgtgtgtatagcgtcacatcgtggcgtcacatgttaatggactacatggcgccacgaagcggttagatgtagtaaccgcatctgtgagggttaacacacgagggcgccctcgtgcggacgtgtatgaaggcgcatgtaaaaccgtgttttgaaacagcgccaccgcctggctccttgtgagataatatgtaaatcagcacacgtagatatcatcccgcccaaaatacacgcgatagcgatacatgttttaattggtataactttaatgagattcaaccgggaaatacagagacgcgttcacgcccacctttccccctccccctcccactttttttacatcatttccgtttcggtcggaaatatcgcactcgccatttttattgaaattacttttgaagcccactccctcggctcctcccaagctcgtcagtatgcagatgagatttaccaggaagtgtcatggcgtccaggggcgttcgtctttatgcatatgagcggcgcgatcacgaaccccgttggcgcgacgcgcttcccggggaggagacgcatgcagatgagatgtgcatcgaggtgtcatggcgtccaggggcgttcacctttatgcatatgagaggcgctattcggcatcccgttggcgcgacgcgcttccctgggaggagacatacgcaaattagaaacgacacacgggttctaattggttggagcgggggggaggcgaaaagcgcatgcaaatgcaaagcgcgggaccgggccccataggctagagccgctacacgcccaccgcccatcatcaacggccaatcacaatcgatagtgtgggctggccactcccactagggggaaggcaaaactccatcgtagtagtataaagcacctgttgcttacccatcgtagcatcgcggactagagagcctttcagctcactggaccagccagccttcgaggactatcgatcgcatcttggaaagcttacccgctcttggcactccttcttcggcttgcggaggtaagagctccccggggacacgaccggcttcgatctgcttcttctcccggggagagcgttagagaacggggcaagtgccaaaaaggccatggaacccctccaacaacgatgtcccgagggggtggctccgaggcccgcttcgacctagcggtcgaagcgcggtggggatacttacctcgaagccggcgaaggctataccttccccgggcagacccgggcggcttctgcctcggcggagctcggcgcggaagcctggatatctgacggggcgtggttaccacccaagcgggggagaggcccgggccgcccgcgttcccttttaccattcggctccgctccaactcaacatcttttccgcctctgcttttccagggtagagaagcggcgcccgtcgtccgagcgcccgccgcggaaccccgccaccggccacccgccaaccttcccttctcggtcttccgagcgagccttctcgtgcggttggttctcgaccccgaagccggagctagcacgccatggccagccagcgcagcgacttcgccccggacctctacgacttcatcgagagcaacgacttcggagaggaccccctcatccgcgcagccagcgcggccgaagaggggttcacccagcccgccgcgcccgacctgctgtacggcagccagaacatgttcggggtggacgacgctccgctctccaccccggcggtggtcatccctccgccgtctccggctcccgagccccgcggagggaaggcgaagcggtcgccctcggccgccggcagcggcggtcctcctaccccggcggctgccgcccagccggcgtccccggcacccagcccggctccggggctcgccgcgatgctgaagatggtccactcctccgtggccccggggaacggtcgccgggccacgggctcctcatcacccggcggtggggacgcggccgacccggtcgccctcgacagcgataccgagacctgcccggggtccccgcagcccgagtttccatcctcggcctccccgggcggagggtccccggcaccccgggtccggagcatctccatctcatcgtcgtcctcgtcctcgtcctcgatggacgaggacgaccaggcggatggtgccggggcgagtagctcctcttcgtcgtcctccgacgacagcgacagcgacgaaggcggcgaggaggagacccctcgcccgcggcactcgcagaacgccgcgaagaccccgtcggccgccggctctcccgggccgtcctccggaggggatcgcccggccgctggggccgccaccccgaagagctgccgctccggcgccgcttcccccggcgcacccgctccggctccagcttcggcgcccgctcccagccgcccgggaggaggcctcctccctccgggggctcgcattttagagtacctggagggcgtccgcgaggccaatctggccaagacgctggagaggcccgaaccgcccgcggggatggcttctccgccgggccggagccctcaccggctccccaaggaccagcgtccgaaatcggctctggcgggagcgtcgaagcgcaagcgggccaaccccagacccataccccagacccagacccaggcaccggccgaggaggccccgcagacggccgtgtgggacttgctggacatgaactcatcccaggctaccggggcggcggcagcagcagcatcggccccggcggcggcttcgtgcgccccgggcgtctaccagcgcgagccgcttctcaccccgtccggggacccctggcccgggtcggatccaccaccgatggggagggtgcgatacggggggaccggggactcgcgggacgggctgtgggacgaccccgagatagtcctggccgcctcgcgctacgccgaggcgcaggccccagtaccggtcttcgtgccggagatgggggactccaccaagcagtacaacgctctggtccgcatggtgttcgagagccgcgaagccatgtcctggctgcagaactctaagctcagcgggcaagaccagaacctggcgcagttctgccagaagttcatccacgctccgcgcggacacgggtccttcatcaccgggagcgtggccaaccccctgccccacatcggggacgccatggcggccgggaacgcgctctgggccctgccacacgcggccgcctcggtggccatgagccgccgctacgatcgcactcagaagagcttcatcctccagagcctccggcgcgcctacgcggacatggcctacccgagagacgaggcggggaggccggactcactcgccgccgtggccggctacccggcccaggccgccgctgccgcggccagccagcaacagcccgaggccccggcgccctcggtccgcgtccgcgaagcgtacacccgggtctgcgcggccctcgggccccgacgcaaggctgccgcggccgcggccgctccggggtccagggcgcccaggccgtccgccttcagactcagggagctcggggacgcctgcgtgctggcctgccaggccgtcttcgaggccctcctgcgcctccgcggcggggcgtccgccgtccccggactggaccccagcgagatcccctctcccgcctgccctcccgaggcgctgtgctccaacccggccgggctggagacggcggccctctccctctacgaactcagggacctggtcgagcgggccaggctcctcggggactctgaccctacccaccgcctgggctccgacgagctgcgcctcgcggtgcgcgccgttctggtggtggcccggaccgtggcgccgctggtgcgctacaacgccgagggggcccgggcccgggcctcggcctggaccgtcacccaggccgtgttcagcatacccagcctggtcggggggatgttgggggaggccgtgtccctgctggccccaccgactcggtcccagcagccctcatcgtcctcgcccggcggcgagcccttctccggctccgcggccgcggaggggagccttcagaccctgccgcccctgtggcccaccgtccccgggaagcagtccgcgacggtcccctcgtcccactcccagtccccccagcactcccagagcggcggaggcgccggggctacgaccgccacctgctgccgggccacccagacaaacgcccgctcccgggggcagcagcaccagccgcagaaggcccgctcccctcaggcggccgcctccccggcccacctcagccaggaggcgatgcccggctcctcctcggacgaccgtgccatccacgggcgccccaggggcaagagcggcaagcggcgctccgagcccctggagccggcggcccaggccggagcctcggcctccttctcctcgtccgcccgggggtacgatccctcggggccggtcgacagccctccggcccccaagcgcagggtggccaccccgggccaccaggctccccgggccctgggacccatgccagccgagggccccgaccgtcggggcggattcaggcgcgttccccgcggagactgccacactccgcggcccagcgacgcggcttgcgcggcctactgtccccccgagctggtggcggagctcatcgacaaccagctgttccccgaggcctggcgcccggcgctcaccttcgatccccaggccctggccaccatcgcggcccgctgcagcggccccccggcccgggacggcgcgcgcttcggggagctggcggccagcggcccgctgagacggagggccgcctggatgcaccagatccccgaccccgaggacgtgaaggtggtggtcctctactccccgctccaggacgaggacctgctgggcggactcccggcctcccgccccggcggctctcggcgagagcccctctggtccgacctcaaggggggactctcggcgctgctggcggccctggggaaccgcatcctcaccaagcggtcccacgcctgggccggcaactggaccggggccccggacgtctcggccctcaacgcccagggggtcctgctgctgtcgaccggggacctggccttcaccggctgcgtcgagtacctctgcctgcgcctgggctccgccaggcgcaagctcctggtgctggacgcggtctccaccgaggattggccccaggacggtcccgcgatcagccagtaccacatctacatgcgggccgccctgactccgcgggtcgcctgcgccgtgcgctggccccgggagcgccacctcagccgcgcggtcctcacctccagcaccctcttcgggcccggactgttcgcgagggccgaggccgcgttcgcgcgcctgtacccggactctgcgcccctgaggctgtgccgctcctccaacgtggcctacacggtggacactcgcgccggcgagcgcacccgcgttcccctggctccgagggagtaccgccagcgcgtcctgcccgactacgacggctgcaaggacatgcgggcccaggccgagggcctcgggttccacgacccggactttgaggagggcgccgcgcagagccaccgcgcggccaaccgatggggactcggggcctggctgcgccccgtgtacctcgcctgcggccggcgcggcgctggggccgtggagccctcggagcttctgatccccgagctgctgagcgagttctgccgggtggcgctgctggagcccgacgccgaggccgagcccctggtgctgcccatcaccgaggctccccgccgccgagccccgcgggtcgactgggagcccgggttcggctctcgctccacctcggtcctgcacatgggggccacggagctgtgcctgccggagcccgacgacgagctcgagatcgacggggccggcgatgtggagctggtggttgagcaccccggcccgagccccggcgtggcccaggccctccgccgcgctcccatcaagatcgaggtggtgtcggacgacgaggacggaggagactggtgcaatccgtacctctcctgaacacgatggagcgcctccctgcggccgaaaacaagaaaaatcagtacatccacaactatgtgtccgcccagcacaacgcagactccgcctagactcccgcctccatccgctgacgctgaaccccgccccgccctctgctgacgcgaagacaaggccctccccggacgacatgtgaggaacgaagggggcgttgtatctagcagcccacgttccttattgctcacatgtctgcccaatcggtgggcacttccaggctttcccctatcgctgagtggttgtttttaataaagttttttttaaattttgattgaccgcgtggtctttgtttactgggcgggttgatgggcgggttgatgggcgggttgatgggcgggttgatgggcgggttgatgggcgggttgatgggcgggttgatgggcgggttgatgggcgggttgatgggcgggttgatgggcgggttgatgggcgggttgatggttcctgctcctccccttcctgctcctccccttcctgctcctccccttcctgctcctccccttcctgctcctccccttcctgctcctccccttcctgctcctccccttcctgctcctccccttcctgctcctccccttcctgctcctccccttcctgctcctccccttcctgctcctccccttcctgctcctccccttcctgctcctccccttcctgctcctccccttcctgctcctccccttcctgctcctccccttccgctacgtcactaccgcctacgtcactaccgcctacgtcactaccgcctacgtcatttcctgctcctccccttccggtgacgtcattgactcctccccttccgcttccggccacgccccttccggtgacgtcacaggaagtgacgtcactttggcccccccccttagaccacgcccccctattcaaatgcgggggtgagacgcgggctggggg

SEQ ID NO: 2 - DNA, 17 bp, Equine herpesvirus 1
aggccacgcccactggg

SEQ ID NO: 3 - DNA, 18 bp, Equine herpesvirus 1
tggggctcactgctatgc

SEQ ID NO: 4 - protein, 202 aa, Equine herpesvirus 1
MRPEGVSRGRASSVSISMCPPPPNGARRASLGCAPPLNSRPVCCAPSSVSLSSSSSRRSMPSLGSSRSSSLPSTGSLRSITRDPERLPSRPPSYTAINPECLLERGAERPRAWTASVMTAPPSYSEALCQAPPAYELVPELSYHPTQDPRGVYSSRSDPHQTSRRRQNPICIFIIVVATMLLILGLLLTITLSSLTNGKKEK

SEQ ID NO: 5 - protein, 205 aa, Equine herpesvirus 1
MDPAWRRRIHVSNPTTINVEPRPRRESLRRQLLSQLFFKKMSQLFKKKRQTRPSTVWYDRVAFPPSAWQGPARVSPYGYESDSENEEYTRISSATSSNVLTDSPTTTQDDPTGRCTDAYAESPAVLHLDDVTRNHRGAAALPSEVYLDGFCDQHKDPSGRMGPIKRRLYSKTFCRKFAAINIILLMLQILVLIGIVYRGFGKECM

SEQ ID NO: 6 - protein, 257 aa, Equine herpesvirus 1
MGACCSSRRNRSPSLAALAEETEVVLRCLAGRVVDLPGGDEVRIAPDVGRPGQNFGYFKFPGPSRFAYVKFIGRAYALGSGRKFLLYLSRNFQVFGYEDGTGLHMLAKSLHDFLKFKGLSDRDLVVVDSVALTSQLRPLTLPIRSTSDVETLVAEEATTNYTSTENLLGQTQSSTHRPLGVPLSNVKTMGVPPTKPSSQRPRGKGGRPPARLKSIREETVSGMARAREECNSPSEHDRLTSEMTDCDSDSSVSSVFF

SEQ ID NO: 7 - protein, 200 aa, Equine herpesvirus 1
MLPANRAEHSSDAEPRDIGSHGRNHGGCYSSDCKLGLLVDISNVVSPLPLDLTWSSWETTSQPARSRSYLNTRTYTIRACCDLQTRLHAFFIGVFEKRDPEKQILLPDLTNFKCILNNPRIMQELATEHSVCSAPFSAATQYDCDEDGEESTINGLCFHCHCKTPFSLECWQAANSAQAKILSVARGITSAKERQRENKR

SEQ ID NO: 8 - protein, 470 aa, Equine herpesvirus 1
MALSSVSSCEPMEDEMSIMGSDTEDNFTGGDTCAEATRGLVNKSAFVPTQTVGTVSALRNVVGDPPKSVVVSFSASPQRAQPSNPKSERPAFGHGRRNRRRPFRRNNWKQQQRVWEKPEPENVPARQSAGSWPKRSSLPVHMRLGQRGGDSSSADSGHGGAGPSDRWRFKTRTQSVARVHRNRRRGNANHGSNTPGRSAGDRLNAAAASSIADVCRRVTSSRIGEMFHGARETLTTPVKNGGFRAENSSPWAPVLGFGSDQFNPEARRITWDTLVEHGVNLYKLFEVRSHAAEAARSLRDAVMRGENLLEALASADETLSWCKMIVTKNLPMRTRDPIISSSVALLDNLRLKLEPFMRCYLSSSGSPTLAELCDHQRLSDVACVPTFMFVMLARIARAVGSGAETVSRDALGPDGRVLADYVPGACLAGTLEAIDAHKRRCKADTCSLVSAYTLVPVYLHGKYFYCNQIF

SEQ ID NO: 9 - protein, 343 aa, Equine herpesvirus 1
MLLGGRTAYLSVLGLITAYAAFTIWYTLTAQLHNPCVYATVSIDSKDGIAAKWEVYNSTIVYAYPENGAKRFSDGLSGFDYVCRENWVNESKLDVLKNMKELHDKVRIVVGTRNCRAYLWSVQLQMITGAWLIYIAFLCLRQERRLLGPFRNQNEFLSPTGYTFNYATYTLATTVLKTHYTKFALLLCEASLRRVALSRTFKRDPIGFLCEHSAALALIGLEVGTHFVARLLVVGTVTLVHTPCSQIYPIYLKLASWGFVVAVTIVEIVAIIYEKPPKTGSSANPPTPATHGVKGLCTSCCSTVLANLCGKLVYLLLVIGAVSILLHYEQRIQIGLLGESFSS

SEQ ID NO: 10 - protein, 1081 aa, Equine herpesvirus 1
MAQRNPEPTIRVLYATDSCVITYSLMLLTGQESSEGVYAISYDWSSELDDLFGRQPRAPNTDAGDGWSSTEQSDADQLATALLQRKPSVSFCLLSGMVGGASDEPQDRVRPMFVCVFSTWTGARALAMTLSHGHPLSSNTLLQALTEEATFLLHNDLILALAITTENVTARSGRTAAAAKYDPQRGSVKAAVIGHSTGRSGLTSVYIHHENKVLTAFRRLYCNNNTTPFWFASKFGPGEREIVLATRYYLFQAIRCSRSGGTYDLQAVKDFIRTYNVPAAPNPTGLDLTHLTSFSLLSKFCCQSWYSRGPCALALPRYVDLRIQADVAEVSALEGFIAADRQGLRVSDREFITYIYLAHFESFNRKQLYDHLLAVSIADPGDIDRITSTSSLKRGTIEKFFAQVRIQLNIRDYIAHNVNPRVVCLPASIGSQYAQDKTYTPSSTTMSTGSAPLGVCDTSTPILKLLDRVESSLAGRGWIQTIVSPNKPQSVHSTPPLDQSRGDELSPGVSSQCGISRRLLHIASSPPVNGRALPLEVLFGQKGVPGPAPVYRVALPSKRQAFAVIANDRWETTTQNLARPGGSKQAYEGGFALAGFGEIDDCSLAWRDLQLTRTTSGVCRTALASSNASAQMYINRNEIFNSSLAVSNIILDVDFGIKRRVPLGMLHLAMRGFRAGIITTLSLIFSDATVQWDSYPCYFYKTSCPPQLVRALHRGEPSSFPDYVDGVEECYMESDFIDDYAAMEEYTDGPMDDYEMMMVDNECPQAACDNTPPNKEGGKTPLQRLDDTDACECTEKMGFRVTVPVPPPYLLAGPEALRGLARIIQQAVVLERTFTESMCSVLRDFSFIDTGVYSHGRSLRLPFFCKVGDSGEVYGGLYPFYVIPPKCNDVDEFVAQHSNPANFHFHAAPRHPTITHVITDLGGDYVSFFERKVARNREAIMTKRATLESLLSSANVSIKSHEAVEAFVVDVVLGEVVSHLATHFPDQSGEYQTVGVHTVVTKPDWILMQINRSGNAYRSQGFSCLRAKHLRSARGLARTFLSISADVHGRLCASISQQCFATKCGNNKMCTIFTLEVDRAK

SEQ ID NO: 11 - protein, 245 aa, Equine herpesvirus 1
MFKWLMSSLCGIRNSTSPEVYEPIIGGQNPATMLRLQSALAAVNALLPATLTIEDVISSADNTRRLVKAQTLARTYQACQHNIECLSRHRASSDNPNLNAVVTTHMINAKRLSNTCLAALMHLYLSVGAVDATTDTMVDHAIRMTAENSVVMADVAVLEKTLGLDPQATVRAQDLLALNSGVLNSVNAVAEMTDPTDDVEFTQSVHSPLLPRQLSTTEVVGVPSPVKSNLKSKHKPKRKASLVAV

SEQ ID NO: 12 - protein, 326 aa, Equine herpesvirus 1
MASVTNLVDSIVVVECGERWRARAEAAGRLLVLINNHTVELSGEHGSAGEFYSVLTDVGVRVACSSGYAIVLTQISGLLPVEPEPGNFSNVTFPENSAKYYTAYGIVDSGYRGVVKAVQFAPGINTSVPPGQMSLGLVLVKLARKSIHVTSIGSTRDGRTSEANLFYDYFAPKRVEDAGYDISAPEDATIDPDESHFVDLPIVFANSNPAVTPCIFGRSSMNRRGLIVLPTRWVAGRTCCFFILNVNKYPVSITKGQRVAQLLLTEDIDDALIPPTVNYDNPFPTYSPSESTKAPQSPVLWKFTTDFDREAPSSLRADGGFGSTGL

SEQ ID NO: 13 - protein, 100 aa, Equine herpesvirus 1
MLSTRFVTLAILACLLVVLGLARGAGGDPGVKQRIDVAREEERRDFWHAACSGHGFPITTPSTAAILFYVSLLAVGVAVACQAYRAVLRIVTLEMLQHLH

SEQ ID NO: 14 - protein, 304 aa, Equine herpesvirus 1
MSDTWRRRRSGCNDANATEELVYSTVRSDHRQRRPSRGTFVMRENDLYDKQSVSKENDLYESASPNDDKVYTRRGMSTAAHYRDSEHIYETCEGDEFYDACEYSLIGGGKLSTSNGRQSPAKAQPPPRGAAAAPPPRVPTRPPTRAAATSTTPRQQDCAPKQRASPGVNSIKSGKGLAFSGTPKTPKSKWYGATHLFNKNVFCAAVSRVAAAHASDAASALWDLNPPKTNEDLDRFLKAAAIRILVCEGAQLLEVANSTMESTPDGYAAAGPNGYDRRPRTASRRRSLKCKPPADDFFDDTNSG

SEQ ID NO: 15 - protein, 449 aa, Equine herpesvirus 1
MFAAAEENDDPYPGKSGYNDTCELMDMDGAVASFDEGMLSAIESVYSIPTKKRLALPPPKAASPGALYQRLQGELGFPEGQTLLSAMEKWNEDMFSALPGHVDLYTEIALLSTSVDEVVRAGLDSLPTPSHYSPEVDLNAHGDEPFPEVPALEDDLEIYVISAQRFYLSELRTREEHYARLLRGYCVALLHYLYGSAKRQLRGSGSDASLMHKFKQVVRDRYYREAANLARLLYLHLYVSVTREVSWRLHASQVINQGVFVSLHYFWAQRRKFECLFHPVLFNHGVVILENDPLEFHDLQRINYRRRELGLPLIRAGLIEEENSPLEAEPLFSGKLPRTIGFLTHQIRTKMEAYSDAHPATPLFPLAEHSYSKRIGGRLSYGTTTEAMMDPPSPSAVLPGDPVPPLTVGVRQTAATLAIPSNLTLQSMETDGLDYSSMTGDELNQMFDI

SEQ ID NO: 16 - protein, 871 aa, Equine herpesvirus 1
MDQHHGARGGAPIRRPRRSIESRSHPFRATGNTQRTYSTPRLSYRDGLSGRTASRDPQEQASNQDESSNPSTSNAQQSTSFWGYLRRVFSDDVPAQPQAPRPRADFAPPAGEESSSEEEEEEGPAQAPLDEEDQLMYADQYSVGDSSDENDEEEDPRLGSDYPTSAESSEYHDHGEMVAGAGAESESETDIDAEEEEEDDEDDEDDMEVIRDESYRLPRTWLDKSIRLMDEALAQSSELSKAITKSTRSLYDSQFAPGGRGYTQTATPSRRLVQLSRAGMYDSDKIVMTGDYMEVDDDPDSAYQLWVRAIRHPLAMNPSWEETISNHTNPSFSTDIDYDIDELIEKNLARTPPVFEGLLDSAEFFYKLPMLYTYATITQDEAYEERLAWSNTQALHGHEQSSWQALLVYYSRGGMYVSPTQEPRGIWRRALKQAMALQLKMCVLGLSDVVTKQNATHHHTAVTFLVDALLRTARNCYLASRLLVFAWERRRETGAKRPAEPLIALSGVTLLQPLPPEVSELLEQRTFDIGLRTPNSAVFRAFFGSLVYWAELRLALRDPASINCRYVGFHLQTSEIYLLARAHSASPGYTKEELVAMEAILTLATLMLEVALQWVHVACAQLLSENDTIKAFRRVSASIPHALAPLGSIRLHDAEFEVLSNPDVMVARDETALSQALFLGYFSVRTALTACMRDYSHEADGGSKETVTGVFLGVGLILQRLAGHLNFLLNCLAGAALYGGQKINIHSLTLPRYSLLADVMAPMLQRQSLVDFWRARDNMLEDLEITPRPGPPTQGKRVVVEMPLPSDDLPDMTPGASVNNGAGLGRMVDMAKQLQHYRETIIGEEATSSVGKRGLIRAGVGVAALRGRRRK

SEQ ID NO: 17 - protein, 750 aa, Equine herpesvirus 1
MDGGGSSSWTHVSKNLIERRAVKGCLLPTPSDVMDAAVMALKDVTENIVGQQLFSVDRTNALSVIHTNEVPESIIATAIARDTSRDYLREYEGAAKCNLAATDLSHDEMWEVVIKRYWRYLRESSGAEVVDRGAVGQATQSVLSVLLLQSTFGKKRLSKNPFKHKGPNVGYKSNLEDLRSAFTKIEKYMYYMRPNDPMTKSEDTELRLHELLAYVTTCYRWLLWFMDLTDAKVLRNIDKGPVITHGPRESRPPDELVRRHLKSGPAISAGTGVALTLSTATADALIVLLRMSVSWTSHSWKSNTHGVTGAIVAAVELVTLIHHHLQYIINTVFAGYVCWLDGGVENSYLNSALRSQGRFDHFVGKLVPIMATLSWANMEKGTVMWFKYALAKSIVCHGSPTQHYLTVLESIASKRTGACPPQGSTFGRNPSGFPGQFCCPPQGPLPAPPNSKTRGTFRRCRPGSLRSSRQLPTSPPSNIVSPRTNPAIEGSTAAKNVQGAETIQVRSSGEFNDCIWYINGAYPHQRSDSSSSDNSTCSSTETQYITLPSTPSPTGDVVYTNPLLGPDEEVDASPQPVDPMSDYSAPKNPDYMRPRSTLVEEVWQLRDSDYTPYMRPSRPSRAGRSRVRVEDQTLEPSSPAGCNPPANSPENDSDDAAVDSPPISPEVVYGTFRPRAKCVYDQYGLTALAALSASRAKARRTRPGPTQPDVCRERDEESAEPRHDGFIRRTMSTTGPPRKHPDQTERVSSL

SEQ ID NO: 18 - protein, 219 aa, Equine herpesvirus 1
MEDYKLLQLETATVDAQAPPLPTKTVPVFAPPLSTPPQPNELVYTKRRRTKRKAKCRCLFFTMGMFALGVLMTTAILVSTFILTVPIGALRTAPCPAETFGLGDECVRPVLLNASSNTRNISGVGAVCEEYSEMAASNGTAGLIMSLLDCLNVGDSESVMNKLNLNDTQLAYCNVPSFAECYTKGFGVCYAARPLSPLGELIYKARQALRLDHIIPFPR

SEQ ID NO: 19 - protein, 468 aa, Equine herpesvirus 1
MWLPNLVRFVAVAYLICAGAILTYASGASASSSQSTPATPTHTTPNLTTAHGAGSDNTTNANGTESTHSHETTITCTKSLISVPYYKSVDMNCTTSVGVNYSEYRLEIYLNQRTPFSGTPPGDEENYINHNATKDQTLLLFSTAERKKSRRGGQLGVIPDRLPKRQLFNLPLHTEGGTKFPLTIKSVDWRTAGIYVWSLYAKNGTLVNSTSVTVSTYNAPLLDLSVHPSLKGENYRATCVVASYFPHSSVKLRWYKNAREVDFTKYVTNASSVWVDGLITRISTVSIPVDPEEEYTPSLRCSIDWYRDEVSFARIAKAGTPSVFVAPTVSVSVEDGDAVCTAKCVPSTGVFVSWSVNDHLPGVPSQDMTTGVCPSHSGLVNMQSRRPLSEENGEREYSCIIEGYPDGLPMFSDTVVYDASPIVEDRPVLTSIIAVTCGAAALALVVLITAVCFYCSKPSQAPYKKSDF

SEQ ID NO: 20 - protein, 401 aa, Equine herpesvirus 1
MMYQPDREPGEDSCLVLSSSSVQRCTGSQRGCMPCTWAASKAFVGIGLQACVLTSSILHIDLLTRNSTCLILMIISMYVLSLIRVPISKMETIVTVCRSIQALATLVAASVWVAGSAVKKEHLLIVVTVCILFVFIAGTQISLFYVICSANGTGTHFRASLLAIIGGCVLGVSVKLVELKDVPIGIGIAIAIIASCQDFGLALRDTCHYRIGRYACMRTFTDLGRGINYRWVTDVEAVPKIEEVAEEKVSLFKFFKEMPGVIFSPAVGTHATPIIWIVLRLVYGISNVWQTPAYVVFCLTVGHVSAMLLEQLVIRVNYTAEASSGIHSTAHAVCMVLAAFGYGVAAPLSLAFTVSGGILGALYLRKRATGARRLAATHISRWLIVCVYVAAGLCYATIITH

SEQ ID NO: 21 - protein, 405 aa, Equine herpesvirus 1
MALPRAMRPGGSHPNNFLFNTLPVIDNPVERQRAMAVFERESLRDAFEMLTPIAPSLKNAFLIFNEDGLLIHTSVGGEQVYIPIQTNNMESYSWKKAPPAVFLANVDGRRGLLDAFKAKTQTNVSKVVFEIENYSPSRILTQTVFSARDQTEEDTEMGSDAEGATQTVSSRLVKHEFNNYALMLPTRQPDVSMSLSKAQLNKILGVCKQAGDPITFQCLFDDTLQVRSGDRQVVFSVDYQHADNCGVESSSSLLEKMPMKTKKSAPEPIRGISGRRLFTLVLDEDTNFKQLIQKLKLKNAGAVLNFFLDPDSIPMIGLSTKQPFSVMMFFMCSYPTQPCQVGFSPAAFSSTPMGAGVKRRASEEEESDQPPKKLFPDGKLFKSNFVLLMDKTGAKIPCPEQPMHF

SEQ ID NO: 22 - protein, 497 aa, Equine herpesvirus 1
MGLFGLLKYAYSNRLVKHDAITTPPGIMTPIAIDLWNVMYTLMEKFDQERNFPLDGAAVTARCFFSLLRLLLKRSYYPIFVSDRGIYGDGRVKQGAKAIVSQTMSSYGGSGRLSSACFTGDEHDTEFQEDPEENDVSVPPQDTCPPTEISAGYVEPERKCEHSSTRWSALDGAPRLSYRLCVNLIRHLGYPYVNACNLEADDVCANLYHTNTVAQIYTTDTDLILMGCDIILDIMPLFPPTLRCCDVLMDLGVTYDEFLTEFVRCHTDLHEPQTLASVQSVISSLHSPPDEDEGADMPQTPSGHSWRCPNERRVISWRRQDDHDYDSSTEDSDQSDSSEEEEECPAGKGFGYRENPAVETCKRRTRPRRSAEASGRILHLKYTSRYPPIMESAPRALVRMAPPKTRHEVLERKFVKHVVSMLTPERRGSLSIMRRLPITQEPSNFSLVHDTLKNLVSEHEIARELANMFWNHIPTPTDYNTVLVNYWDDCGHRRQWS

SEQ ID NO: 23 - protein, 321 aa, Equine herpesvirus 1
MSIENSKEAALTAELSLAGAFFYTPECPDIEHLRSLSVANRWLDTDLPISDDLKDVAKLTPAEREFYRFLFAFLSAADDLVNLNLGDLSALFTQKDILHYYIEQESIEVTHSRVYSAIQLMLFGNDAAARARYVASIIGDAAIGRKVAWLQAKVRECGSVAEKYILMILIEGLFFASSFASIAYLRTHNLFVVTCQSNDLISRDEAIHTRASCCIYNNYLGGFEKPEPKRIYELFSEAVNIECEFLLSHAPQYSHLLDIGAIISYVRYSADRLLGEIGLSPLFNAPKPSPSFPLAFMTVEKHTNFFERRSTAYSGTLINDL

SEQ ID NO: 24 - protein, 790 aa, Equine herpesvirus 1
MALNFLQSDCPLAIIQDVISRVDAISDYGYANELSTTLPPRPSRSQVLEYITRVVDTLKPRCRVDERLYVVCGELVHLRIRTRNVEDLKYWLNSTEIALNEIVEKDILDHLDFIQRTLHAFESSEYRELCALGLQSALKYEEMYLAKMRGGRIESMGQFFLRLATTATHYTMEEPAMARVLVSGEVGWTYIFKAYFTALAGQVLIPATPIMLFGGRDCGSLASCYLLNPRVTDMNSAMLALMEEAGPILCNRGGIGLSLQRFNTPPKEGCSRGVMALLKLIDSMTMAINSDGERPTGVCVYFEPWHADIRAILNMRGMLARDETVRCDNIFACMWTPDLFFDRYQRYLDGESGVMWTLFDDTASHLCHMYGKEFEEEYERLEQCGFGVDSIPIQDMAFIIVRSAVMTGSPFLMFKDACNKHYHFDLRRKGAIMGSNLCTEIIQHADETQNGVCNLASINLPKCLAIPPPHTAGVPYFDFAALGRAAATATIFVNSMMRAGTYPTVKSQRGVDENRSLGLGIQGLHTAFLMLDLDMASPEARQLNKQIAERLLLNSMKASATLCRLGMKPFKGFEDSKYSLGELPFDSYPGVTLANRNAWRRLRTEIKQHGLYNSQFVAYMPTVSSSQVTESSEGFSPVYTNLFSKVTATGEVLRPNLLLMRTIRSIFPRECARLQALSTLEMAQWSVVGAFGDLPVGHPLSKFKTAFEYDQRTLIDMCADRAPFVDQSQSMSLFITEPADGKLPASKIMSLLVHAYKRGLKTGMYYCKIKKATNNGVFVGGDLVCTSCSL

SEQ ID NO: 25 - protein, 465 aa, Equine herpesvirus 1
MNLGGNRFVQIGNGMSNIMYTDANGAVRWEQISPPAGFPQQQRGRGRGHVAFGLPNTLDWLPGFVQATPNSITISNMGGIQISSAGVITAAINSEQNSWMLSSFNPSLKLTRQVTLTDFCDPTAERPGLPIIRLRHHLDAIGSSPSSTPPGRNPQELDEAWAALSELSVSGRSDTTGLRPSLLSLTFLVASRSGEYSDKAAAEAVRAHVLANYRDRRTEQRLDRFGEYLQAMVRTHVFPHKHMTVFGGLISHVIQDKLASLTAVAGGVQEGARTNNSAVPRSSVYVPACAFLDVDHELKLGDASAKFVYLIFVYSQRLRREGVRVYVAVSKFDEVAFEDAVSFLFHKARTESAIRGTEGADAPEPHPNAALPLQELSSSRCEPRCPPSRLNNREFTNALYQWAPDLRGRPNRTSCMYAAYIRLGAIASDPPRTTRRSERFGSVDMPVVWLENVRWDPQDWVECSY

SEQ ID NO: 26 - protein, 1020 aa, Equine herpesvirus 1
MAREHGSMRALVNSLAGLLGETDTEVPSLEPAMLMVLKSSISEFFLSTDTVSVDEAAELFPRLQFLACRAYAASHTPDAAMLAENLAGLVLWRIHQNWTDREMEAVDQMFVLLEIMNGESGVYMLSNNNLRISAKYGPSNMHLIVSTWLDTFRNVMSVAAKSTPDSLFNSKRMESIEEFSKPLVHAKFNLIYDMPFVQEGLRIVAKKINWILPFGLMVKGYKDMSMAPLTRALFLLSLVDSYFPKGTATEGSMKALTAYFRELVRTIDNSAFVPITEVNATPRTAYEVRVSSAIVHQNPYVTDTKAGMVAERVRTDAEILTSGALLSSGALSAHATAVAKLLSSNEPDDVSSRARARVAEHASNTWETIQASTTPTQVVEALVTAGFTSTHCGILERVVVDYFTRLRSTANSGPGRNDSLDYAQQVVGCVAIVGGVVFRLLLSYGFGLDYIRDYTTTISTLEPVYNELLSALGLADKGVEQTLKRSMAPRPYMNYISAARAALDDELLIVEKRTTGPGTHSAARESLLTWFDFRARDRWGVRIPDRDTTSTQVLAPITASLYSDDDLIAAASKLSFDALDAPPTQIIDDPSFAPYMLATVVLDAFNAILTSRFSADSVSQALRVLSWARDYGAGSIANVDGYRTKLTAIIASVSPFLQKDAPTPTMAHANNLEALLGELHSVVVAAIALIPERARMPVPERPSVKTSTFLAGLFLTAVYKRLETLVGHTAELTNNILGTASGIVSSIVTLNRFFNCRIMPVMGHYAVLIYPQSAQSAPFGRWRLVDVVDAVGSIYNEVSDLRADLRADVVTLKGDITSAAEALQECEALAVKTEGTRFGKLFNSLLTRHTQLARAQRGLAIRAGKLLGGSEAPGLKHVNTFLQRWGAISVMYQKATSGSTPEVNITSLANTLRHVWDEVQQERKATPPSRKFSNRDLGLAVERLMGGYPEVLDDDSNSTALTPKFNVDSWNSVNMDALRKRVTMPANIDSIRGNDSLATREYLKKEDLLAEIDAIFNNTK

SEQ ID NO: 27 - protein, 3402 aa, Equine herpesvirus 1
MAQTLVPANKAGGAQADVVVIGYRNQYDSQLGEGSHVSCLRSSLSFLRLIFTHGIDFALTADSIDGVLVEGRAWTVAGSKSGEAPCMVSIVELPNKITYANSANALCCVFSRLYGDSGFYMHPGDGFQSTQIPARQFFDGVWKSRSESFALITIGAIGLAVYRHGDVAYVFDPHGHGSVTEAFVVRVLARDVYAYLTGYAATDPESDWAGALVFFVTCGPTESEPGFLISATSLLYGISETYLSDEQYVERSVATSHPGISTPPPLTDVAVGAVSEAWQYQELENGAATLDADMEGVAPAAAQVRASVIRQPTEKRVSLPKRRRPPWTPPTSSENLTTSGNTHTVAGRPSQKVRNATANVQNPTTGNGSAWAEALNDGGVDNASRPGQAVGAAGTLQNPAPGDALAMETTQASEEALRTRRVFRLSGEDEAPYDLGDAVGVLSAEINELATRAEELDVLSSTCVDSTVWVTRPHNSPDMDILEQFITMIFNRLLSFLVENGARTRTDSPSVIAGLFPGVLAAIPTQSAVVNLLQATGMALSDVASYKSILNMVSNEDSPVGELAVIKLELVASEVIKSTQKLVARVEELERDVTSGSVNPLGLYTYLTERLVAEMTKHGGDLFAREPKPGAVSLTERIGSLFRKARTREARATRTNASLARDLNAIEAAVHAAHDKFDAIEIKPADPSDTTNMDELAKSLDLSAVPTRVAKVIKKVESMVSDSIREYFLRGVQYSARAIAMDKTSGARFQVASAAVSNLERMLDSLPNFEKSLNSVVASAGIQGPPPAQISGSRKATLLGNLLRAGQNLTTDNALGAWAALLSEAHTEGHIERRELEAVIKEITSINDHAAKKASVEADMERFRVLSAAVDQATSDMYNSNPHALDTIIRGAEEMIRQAKVVEAHFDSGRISREAASRVGVRKREVETLANSARQRAAEISAARDEIYSRLQSLLLPLAGFVGLRAAPGVLEQLAKDAQRSTSEELRNLMHEAPKQVVSTVHSHLWSLFGQFREALEHPNSTTSSALAGVGPAFAIVVRSLLDPNKQRESVEFFITHADALADTVGAVEANPNSELAVAHAVNSIAAAIQTVSVGGRTITEFAFLVPMLERYQSRLTIVRETQRLATAQRAVAASVSAAAEVTTKLRAVAVPGVQEDVLKAAIAAAKHVSSEVTAAATAAERELARLDSKALSVAQVARAHQDLQKQTAVAKQRVGEIEEVLANLNKQQRELQDRAVHDRWKSDLLAALDKIETKSSFDVSELSRLRDLGAARGYDSREFAKRAEQALAANARAVIAVLDNVFKFNPYAPVNSKKETNPTISMLYNISWWDDFTLAAPILNTLFAGVDVEELMSLMRISTGMITFASTNGGRPKYNEAVNSLSSDMLKVPQLAKYVDFYGKWYTEFNAEMDVLSKLRADVLQAVGVRSGEISRALEEVTYVRNAEVAEKVLADGVKLYIPSDALIAKAVKYLEEFNQKRFAGSAFEEAIATTIRQDLSTAREAATQAEAARSEAMHRATHILREVVEAAKAADRDASANLANLKNLLRLTPPPQSVAAALDKATSSDDIVTQAALLLGTVESTPELDIKAVEWLQQARSIIDSHPLTTKIDGKGPMDPYAERIEKLHTLRGELDELRRQLTATEVSWDEAWGNFSRAVPRADVSMDGFVDAHQRARTLQASMGVISEMRADNKYGRLPPKVIGAIESKFAERHKNLETFNDTSTVLQTAITQFDSLVQQIPPEMEYDVLRSLLASFDQLAAVLPKWVGAEYAAYRSLLLMRIGLYDEYQKIAGIAAAGSRPHLEAVEYRSAVEDANLRRASRVSSLMGDKDVILSLREAKSSIDTAFPQVLLDAKGVPVEYRVCYRAVGDKLAAMLCGKLGVSMRPAMPSDPIVESSSVSGINVTHDILQLRFGLEKAYHSGFSTFARFVRHKRADWSPTEPAQAAAEIYAAVLATTLTREYGATWHRIRFMASSGLFVASPDSVCDTQGGRGKKSNNIVHLTLSDVVLSAMLRNSMHLVNFMRLDLTRQHEYMARTITPVLTKSLLSDILINTLVPTDTSTQWRSLPLAGDLEDLAQGMLFSIRMSDWKQNSFSTTSLLDVWMRSPGESGRAAAAKIASAIPGNPLATFTVLARMCIPPNALASLWEALQPEAFSQQNLSYDDVVTSRLDIASTVQTSVAVDPEMKSVDTKSRKQLYTTTGTSTTFTLAGSAPSAVKEVSALDVATCALMFGAPVVIAMETPEMFSEASGMSFCLKIFDSRPGATDHEIIQAVSSDLSSWGTSLLALDPNAIENACLTTQLEILSGLVASKLLAPAPPCLIVLDPSMRVIKVLWESESPPNDLVITLAEDEIIAELPYLNADDDLLPPMNPDDPIYTRVISGTNIPTATTEGSLFADQQLEFLRPESNPFPFASHDSSQSLDVPSSPSSGSDKYEEDPTGIVYDAPVDDMSDMAMNKAKAWQEWLEDGFAEDDYRELSNAMPAPPKTTPVVESKQKSDSVDRAPTLPPKAAPLPPSDASAIMSGKPVFKYTPGNKSAVPPSVPAPPTLPPAPPLPQSTSKAASGPPPTLPPAPPLPQSTSKAASSATQSDSGKTLTLDVPKTQSKDKVVPVPPTDKPSTTTPAALKQSDASKPPTAAIQHQQKLGTPVTPKDSGDKPTDNASAPVGVSPVTPDGTPGAKPPPKDAPPVDDTKQPVRKSLPSQVRGGRPYIRPSLGPFKFTGPPGYTIPVHGLPPSDSNVTQSTKEPPKPAVETPAAAPAKSAAAPAAAPAKSAAAPAAAPAKSAAAPAAAPAKSAAAPAAAPAKSAAAPAAAPAKDQTKSAAEVPKPAKDQAKDQAKDQAKDQAKDQAKDQAKDQAKDQAKSTTGQKLAKDPKSDGLTDDVALEIVPEKTPLPDDSPIGAVPKNTPLPDDSPTGAVPENTPLPDDSPIGSPDLSASKNSHTTDAVSSDRFSVACKVPLPDSPEDDFYSYAVDVPLPDSPTDDPSSGRSDARAPTVGGVASIHRKSDSRNNRQSDAWRRAFADTLHGRPRNRSATKPCKSAPYKVPHAISYTKIPSVPNDQSGLAGKPCSEEPKRPTGRDTPVGSWNVSPSQAPADIPAAIPQNQNTSESPRTTSLKSPTRTVQSSMPADDIDELAEYDLQIARAVPVTKHPQPPPANQTPPPQEPPAPIDDRKNIRPPLSEEEIIAFLINMDDDDAGNASGPVDLHSVQAPKLPKQSKPTTNQFVPLDWWTETEPVVDADSLDLSPKQQRLFSWESTRDLLNINVRDRVYEEESDDEYTVSWDQHLVPAVSPTSVSSYSSDTVTDSYTDINDPRSVVCPLDGNAQNNVREFLDTHSSRVRVVPADELLSRRYFRSTSLSAMALLIAACRTIVRRLRATRRVLTDINRSLLLDLKQIRVLLG

SEQ ID NO: 28 - DNA, 63 bp, Equine herpesvirus 1
ctcctcccactcttccacccgctccccctctgccccaatccacttcaaaggccgccagcggcc

SEQ ID NO: 29 - DNA, 33 bp, Equine herpesvirus 1
cccccgccgcggccccggccaaatctgcggcgg

SEQ ID NO: 30 - DNA, 45 bp, Equine herpesvirus 1
ggcggttcccaaaaacactcccctaccagatgactcgcccactgg

SEQ ID NO: 31 - protein, 119 aa, Equine herpesvirus 1
MAADKQQQQAPVAFNPADPPNIKAANFKDMLPVDVITILNQNIDELDYTKYTEDEISEGLKQLFMGTARTMVSLRQRHLKSLVRRSDMFAQNDASTWARPNIGLKRTFPPRFMQPISED

SEQ ID NO: 32 - protein, 275 aa, Equine herpesvirus 1
MDSYNYRDFAVGGGLLQRIRLVVSGSLHCGESDATLNDPKHLPARCVFQFSGPDNNSVTFPIEYVLRLMKNWARSQCDPYIRIQNTGVSVLFQGFFFAPPNAPMASITSEHNNVILKSTHTTGLALSGIERVKRGGGLDLRPLQAMMQISCFTRMPVVQLSFRFMGPEDASRTQRLLERATSFGAMELHQKRTVDSCDRSNGIVSPREHRECRERQKRRPTPKRCASEVFASLASISSAFASERVKRRPVRIAAAILAFVFVAVILAIATKGRLF

SEQ ID NO: 33 - protein, 140 aa, Equine herpesvirus 1
MTSRLQLAAMEQNASDAALSGMQQARSRQASPKRLRDLIPSSDVESMSLNALDDAYGHHDFSVWFEDLMPPEMELLMPTTDAKLNYLSFTRRLASSVFHSPDNRMPGGACDHTSALDARKERFATIINKFLDLHQILHDA

SEQ ID NO: 34 - protein, 620 aa, Equine herpesvirus 1
MAASCNLDVIGEDGGCALTGGWQPGAFERPYMGFDARLLSTNSSLCSELIFSAHLMQISPTPQPREQVDVCEDPDNDPPEPSCAQFVDAVADSLALDKLCLICRTIDLYRRQFGLSPQWIADYAMLCTKTLAAPPCAVATVVAAFEFVYLMDKHYLRRGKTTLVGAFARRVLTLVDIQRHFFLHVCFRTDGGVPRCAASGTAPAATAMAGLGMADKVQYSNYSFLVQSSTRAMLLTVADVPSGDDGALQAVPHGRHGAGRPADGGGGVFGPKQQSTVAALMSWKECAKMIDCSGSERRRPGATMTCCERARADDDEYERQLLSTENTYLGSADNQAEGGNDTHLKWGYADLTLLLLSQSSTWEASEKTSLASQSRRACVEEYWASHRTVLARDTAPRFARFVDADAVPDTATGPVLATTLKHVRSRGRTCAECVLCNLILTREHWLALRRFKRDVISYSSNNANLFDCISPVLSALSDANSEPLAGDCGVGGGGTCPEDSGRFLELMHAAGTEAIYKHLFCDPMCALVELQTNPSVLFSPIGPPPEPDEIELQKARLASENWFSGRVCAGLWALAFTFKTYQIFTPKPTACAAFIKDAGLLLRRHNLPLISLEHTLCNYV

SEQ ID NO: 35 - protein, 326 aa, Equine herpesvirus 1
MFDGRSDIYDSKSFAAELDDLYSCRSTGRENGRRSRVSTRGVHRDRCGSAAKRRSTKRRCELVARERDRYSLYLDYMASHPSDEISAVRELVVPLIKTTSITLPFDLNQTVADNCLSLSGMGYYLGIGGCCPTCTVSGEPRLHRADRAALILAYVQQLNNIYEYRGFLASVLAAAAQGDQAGVAASEGVQAERLLENVLAQPELFFAYHVLRDGGIQNVRVLFYRDLSVSGYMMYAVFPTKSVHLHYRLIDRLLAACPGYKIIAHVWQTAFVLVVRRDEGQQTDMDIPTVSAGDIYCKMCDLSFDGELLLEYKKLYAVFDDFLPPV

SEQ ID NO: 36 - protein, 1220 aa, Equine herpesvirus 1
MAAREQANSVRRSGFFNPFIGKRPFFRPGSGQTAETERPRPPQHSYCTEVGSFKFIAPRCLDEEAPADQRRGVHVGTLERPPKVYCDGSEYDVLNFASGGCWPRRIRVWNGQDFRGDGFNPRFERFHVYDIVETSESASHDDPSRFAELSRPSGSVVTLLGMSECGKRVAVHVYGVRHYFYMAKAEVDSACGITTEAELVRAMVDCAHSSALSAALGNGNGGKQSGGSGGGWWGGKHVSADCFKVETVCHTTLYYFGSKPALYYRVSASSSRLGGFICDNFHPEITKFEGSVDVTTRLLLDNENFTSFGWYRLRPGTHGERVQLRPVERHVTSSDVEINCTPDNLEPIPDEAAWPDYKLMCFDIECKAGTGNEMAFPVATNQEDLVIQISCLLYSLATQNHEHTLLFSLGSCDISEEYSFACVQRGEPRPTVLEFDSEYELLVAFLTFLKQYSPEFATGYNIVNFDWAYIVNKVTSVYNIKLDGYGKFNKGGLFKVWDIATNHFQKKSKVKINGLISLDMYSVATEKLKLPSYKLDAVVGDVLGEHKIDLPYKEIPSYYAGGPDRRGVIGEYCIQDSRLVGKLFFKYLPHLELSAVAKLARITLTRVIFDGQQIRVYTCLLKLARERNFILPDNRRRFDSQADAASETSELAMDSQSHAFDSTDEPDGVDGTPDAAGSGATSENGGGKPGVGRAVGYQGAKVLDPVSGFHVDPVVVFDFASLYPSIIQAHNLCFTTLALDEVDLAGLQPSVNYSTFEVGDQKLFFVHAHIRESLLGILLRDWLAMRKAVRARIPTSTPEEAVLLDKQQSAIKVICNSVYGFTGVANGLLPCLRIAATVTTIGRDMLLKTRDYVHSRWATRELLEDNFPGAIGFRNHKPYSVRVIYGDTDSVFIKFVGLTYEGVSELGDAMSRQISADLFRAPIKLECEKTFQRLLLITKKKYIGVINGGKMLMKGVDLVRKNNCSFINLYARHLVDLLLYDEDVATAAAKVTDVPPAEWVGRPLPSGFDKFGRVLVEAYNRITAPNLDVREFVMTAELSRSPESYTNKRLPHLTVYFKLAMRNEELPSVKERIPYVIVAQTEAAEREAGVVNSMRGTAQNPVVTKTARPQPKRKLLVSDLAEDPTYVSENDVPLNTDYYFSHLLGTISVTFKALFGNDVRTTENLLKRFIPETPHKTPTKTQALLERAGFEKLTPFTPEEESRRILHTVFCTLEAAPHQS

SEQ ID NO: 37 - protein, 1209 aa, Equine herpesvirus 1
MESAPKTVSLPVSPLGYVYARQKASLQTGTVSLTAARSVDSDLAVLPVIRGLTVEQTFTTNVAVVAGSKTTGLGGTGITLKLTPSHFNPSAFVFYGGSVIGASSNAPNLTRACEAARRRFGFSAFSSPPVENAVETSGEEICASLNLSPETTALYLVVTESFKEMVYVCNTFLHYGGTSTVTIDGQDAMKIPIYPVQLYMPDVNRLASEPFNAKHRSIGDEFVYSRPFFNSDLCRLLHGYVLGPAAVALRVRNLDGVARGAAHLALDENHEGSVLPQDVTFTLFDSTQGNAGKGSGRAQRQGDGSGSKNSASSGIERRLASVMAADTALSVDSIMGAGIYDTELPSVEDWPVLSSGDDTESLEALGAYAARLSGLVGAMVFSANSVLYMTEVDDGGPADGKDGSNPSYHRFYLIAAPYVAGNPQTDKDGRVLPHTADQQAAPINGSNQEFSLDYLALACGFCPQILARLLFYLERCDAGTFGGRNETDALRYLANTLESDVPCGLCNQATRPACAHTTLHRLRQRLPRFGAPVRAPIGIFGTMNSAYSDCDVLGNYASYGALKRPNDNEAPKSIMQDTYRATMERLVNELEQAKLIDKETLAQASPCSAPTSVVHDQASFIGLLSNIKDTIEGAAEQFMRTLVEARDFKIREGLADANHTMSISLDPYSSSFCPVTSFLARRTVFAVLQDLVLSQCHCLFYGQSVEGRNFRNQFQPVLRRRFLDMLNGGFITAKTVTVTVSDSGVLAPDLTRPASEPPTKDYDGDMARVSMEVLRDLRVKNRVLFSNGGANMSEAARARVAGMASAYRRPDKGSNILNGAVGFLVKQYHGVLFPRGHPPGIDTPNPQWFWTLLQRNQMPARLLSKEDIETITAIKRFSDEYSAINFINLTPNNIGELAQFYFANLVLKYCDHSQYFINGLTAIVVGSRRPRDPAAVLAWIDRTINGAADVEPAAQEVLQRLGSNPAAWTGTFTSTNMVRYVMDQRPMVVIGLSISKYNGSAGNNRVFQAGNWNGLNGGKNVCPLMAFDRTRRFVLACPRVGFTCEAGGFGTGVRENTLSEQVRGIVSEGGPMVQTAVFAAVLHALGARTQHLAVDDWIGLVDDEFLAASLDALNATVVDQFGEWSVEAAQELVKNMEAQTTAGAVAAGEGAFDFGACVGDTPQQSTSAFNGGLAMAAAPAGQKRSLPDDILFDMGAPPEKKSGLTFDML

SEQ ID NO: 38 - protein, 775 aa, Equine herpesvirus 1
MEQDDAPAAMGSAQARQRLLAIFGQVQAYIFQVEMLKRCDPLALLPLVGSLKLNALTIRMLRRKLGGALIEQAQHQQTPLACALTMALEYAEVEGERVLRAVDDVNLAGPEGFFRATMRLDEPCEYHVRVHLDTYGGPIDAEVQFLHDAENFLKQLNYCHLITGFEAGLDALESVARFLTRTVGSGIVVPPELCDPTHPCSVCFEELCVTANQGEAVHRRLLECTCDHITRQMAVRVANIDIARHLPHALSVASERRAAAEAALRALEARRVQGHNGKSAGTEDPTQQVASRLLESHHVFKPASRCLYAVSELKFWLASTKHGDMGQPRAIDTFTENLETLDKQEKFFHLQAATVELALFGRTLDHFDRLFADQLLGLDVIDGMLVGSCAVSPDDHIEALIKACYTHHMSAPLLQRLTDPDTSNREALKQLLGRIGVDTDDGAGELGDALDVDLDNLGGAPPVNSTPCGEDALCRTVSEERPWDKLLERATADASQRRRMYAERLSKRSIASLGRCVREQRRELEKTLRVNVYGEVLLHTYVSSYNGFCARRGFCAAVSRAGTIIDNRSSTSAFDSHQFMKAALLRHPIDQSLMPSITHKFFELINGPVFDNAGHNFAQPPNTALYYSVENVGLLPHLKEELARFMITAAKGDWSISEFQRFYCFEGVTGVTATQRLAWKYIGELILAAAVFSSVFHCGEVRLLRADRTYPDSSGAQRCVSGIYITYEASCPLVAVLSAAPHGAIGAETVVIYDSDVFSLLYAVLQQLAPGSGAN

SEQ ID NO: 39 - protein, 980 aa, Equine herpesvirus 1
MSSGCRSVGGSTWGHWRGDGGDLRQRRVLSPVCSAPAAGSWIGSQLGNVGNLLATPHPLGKPASSRVGTIVLACLLLFGSCVVRAVPTTPSPPTSTPTSMSTHSHGTVDPTLLPTETPDPLRLAVRESGILAEDGDFYTCPPPTGSTVVRIEPPRTCPKFDLGRNFTEGIAVIFKENIAPYKFRANVYYKDIVVTRVWKGYSHTSLSDRYNDRVPVSVEEIFGLIDSKGKCSSKAEYLRDNIMHHAYHDDEDEVELDLVPSKFATPGARAWQTTNDTTSYVGWMPWRHYTSTSVNCIVEEVEARSVYPYDSFALSTGDIVYASPFYGLRAAARIEHNSYAQERFRQVEGYRPRDLDSKLQAEEPVTKNFITTPHVTVSWNWTEKKVEACTLTKWKEVDELVRDEFRGSYRFTIRSISSTFISNTTQFKLESAPLTECVSKEAKEAIDSIYKKQYESTHVFSGDVEYYLARGGFLIAFRPMLSNELARLYLNELVRSNRTYDLKNLLNPNANNNNNTTRRRRSLLSVPEPQPTQDGVHREQILHRLHKRAVEATAGTDSSNVTAKQLELIKTTSSIEFAMLQFAYDHIQSHVNEMLSRIATAWCTLQNKERTLWNEMVKINPSAIVSATLDERVAARVLGDVIAITHCAKIEGNVYLQNSMRSMDSNTCYSRPPVTFTITKNANNRGSIEGQLGEENEIFTERKLIEPCALNQKRYFKFGKEYVYYENYTFVRKVPPTEIEVISTYVELNLTLLEDREFLPLEVYTRAELEDTGLLDYSEIQRRNQLHALRFYDIDSVVNVDNTAVIMQGIASFFKGLGKVGEAVGTLVLGAAGAVVSTVSGIASFLNNPFGGLAIGLLVIAGLVAAFFAYRYVMQIRSNPMKALYPITTKALKNKAKTSYGQNEEDDGSDFDEAKLEEAREMIKYMSMVSALEKQEKKAIKKNSGVGLIASNVSKLALRRRGPKYTRLQQNDTMEDEKMV

SEQ ID NO: 40 - protein, 160 aa, Equine herpesvirus 1
MDSPRGISTATGDAHAEAAVSPAAEIQIKTEAPDVDGPEATTECLDHTYTQQTSGGDGLDAIDTDGLLEMVLTSENTESEPGIPFALRGNFICCRDDNCRACRELPFRPSVIGFSRDPHVSMALDMTSGNWAYVPRVFPDTPTAPWMANYCIPDLDEHAD

SEQ ID NO: 41 - protein, 329 aa, Equine herpesvirus 1
MASSNPQTLSAAGAPLVSGDYILVPAAQYNQLVVGQHTSHPPINAGPAPVTHAVPSQYIPPAYNSLMPPSMYQAPPYWSVPHSANLEAQITALVGALAADRKATKGSDPHVIQGSQCSPPLSPQQERRYARKRRHDWDATTRDDLEGIYYPGERSPRPGERRAGRPSTTIADLMGAVSSLQQEVSQLRAIQTVTAQPQAAPAGLYKPIPAVPPQYSQYQYIQPQHAVSAIVAPQLPGIPSQPTQAVLAPQVPAGEAPGSAKVVAASTAPQQAEQARAAPQQFEAVTSAAVLPVTQPQASSQTVDASASTGLEFGRDDADIFVSQMMSAR

SEQ ID NO: 42 - protein, 646 aa, Equine herpesvirus 1
MDAYTVDGNAVSLPIYVAGYIALYDMGDGGELTLTRETVAAALPPASRLPINIDHRNGCVVGEVLSIVDDARGPFFLGIINCPQLGAVLATAAGPDFFGELSEGLSEQERLLYLVSNYLPSASLSSRRLGPDEEPDETLFAHVSLCVIGRRVGTIVTYDATPENAVAPFKRLSPSSREELLITAREAQSRLGDAATWHLSEDTLTRVLLSTAVNNMLLRNRWNLVARRRREAGIEGHTYLQASASFGITNGCNKADFCGAELVDTCGYKSGEKVHGAPYSRVTLGAKAFTSSSPNALPSSDNDKGGIGERTQKHISAMASSNPQTLSAAGAPLVSGDYILVPAAQYNQLVVGQHTSHPPINAGPAPVTHAVPSQYIPPAYNSLMPPSMYQAPPYWSVPHSANLEAQITALVGALAADRKATKGSDPHVIQGSQCSPPLSPQQERRYARKRRHDWDATTRDDLEGIYYPGERSPRPGERRAGRPSTTIADLMGAVSSLQQEVSQLRAIQTVTAQPQAAPAGLYKPIPAVPPQYSQYQYIQPQHAVSAIVAPQLPGIPSQPTQAVLAPQVPAGEAPGSAKVVAASTAPQQAEQARAAPQQFEAVTSAAVLPVTQPQASSQTVDASASTGLEFGRDDADIFVSQMMSAR

SEQ ID NO: 43 - protein, 587 aa, Equine herpesvirus 1
MAEYVNYVLGSLYVSDTATSTIPTDVRNFIAPPFPLNFWSGPTFTVRSNTRADPLKLVAARHRAAAAAIDTLEAQSQYGVANVDALIRPLERQVAKVADALAALEDAARAAESADAATPQVNASEADQRPDNIGQSLSEIQIAKNDVPMEFDTNLAVDLLATVFVSRAAGGSNGVVFGTWYRALQDRLVTERPVATRSIDYRDGRMSKTFMTTAVVSLQSCGRLYIGNRPYSAFEAAVLCLHLAHRAVNSNYTYPTSFSGLIEQLPVYIEAFSTALGDGTLGKVGYEFNGARLPKNQFHVPGGGGRYERGALNGHGVLETLIRLKVLPAIPGSLGTTSTAVGPELDADQTAYIDDVNKAAAAFLVRAQNLFLTEDQTLLRSTINTITALLLLRRLLWNGNVYTDRLRNNFQLGAIVPNLAVSQRDARGASGGDAAAMVSRSGNNNFTFLCERYVSPIYIANREVELTQLFPGLAALCLDAQTVARDQPQHRAVNVSTGRNQTNLTRLIGIELENRRRTAPVPINEVLAAHDAVALQYERGLGLLMQKPRLRASLEETRRLGQFNVASDYDLLYFVCLGYIPSLTSAM

SEQ ID NO: 44 - protein, 272 aa, Equine herpesvirus 1
MKRRQRLTARSRLRAGIRCHNRFYNAMVQDLASAKRNGVYGERLAPLFSELVPAETLKTALGVSLAFEVNLGQRRPDCVCTVQFGKGSDAKGVCILIELKTCRFSKNMNTASKNLQRKGGMRQLHDSCRLLARTLPPGSGEIVLAPVLVFVAQRGMRVLRVTRLSPQVVYSNAAVLSCTISRLAEYAPPVSAKSTRRRCVAKGTKAKAFSTKAAAEPVPSITPAQPSAAAAVVSLFPAAVPANTTNAAAVHQPVAVSHVNPLAWVASLFSPK

SEQ ID NO: 45 - protein, 352 aa, Equine herpesvirus 1
MAARVPSGEARRSASGAPVRRQVTIVRIYLDGVYGIGKSTTGRVMASAASGGSPTLYFPEPMAYWRTLFEADVISGIYDTQNRKQQGDLAADDAASITAHYQSRFTTPYLILHDHTFGLFGGDSLQRGTRPDLTVVFDRHPVASAVCFPAARYLIGDMSMCALIAMVATLPREPQGGNIVVTTLNVDEHVRRLRTRARIGEQIDMKLIATLRNVYSMLANTSNFLRSGRVWRDGWGELPLSCETYKHRATQMDAFQERESPELSDTLFAMFKTPELLDDRGVILEVHAWALDALMLKLRNLSVFCADLSGTPRQCAATVESLIPLMSSTLSDSESASSLERAARTFNAEMGV

SEQ ID NO: 46 - protein, 848 aa, Equine herpesvirus 1
MLQPYRKMLIFAVVTVAFAMAVWSTPVPATPSGVGNATWANNSFNITRYDKITMGQVYSNTSNSPIFFVVISERNFRIVNTPLGASVFWIPKGAMNPPQHQPCVANGPEPGDPRGPCVNSTVSLLFNENVEPFLMSKNLLEFEVLPDTYITGWTFERSKTATTKSNPVGVVLSPPRGSPSANTTIRDDGGPKKPLSIIDEYTTLVADLQNFTMTLTYISPFAAVWPIEAFQTGITVMGCDTTQVVAYLGHGFMGLQISSVNNPPLEMIVVPNDVSARILNRRPSRLRLEPPGPHAGPIYKVYVLSDGNFYLGHGMSRISREVAAYPEESLDYRYHLSLANLDTLAMLAELSSGKSTDVSYYMYRIVARLAVATFSLAEVIRLSDYMLLQEAIDVDMNLRLIVPLVMKYAAGGAADSSYTSSDVAMDQFDVAQSQIEKIVLDINVEAELRKPMYEHRSLLRSVYAYSRKPLPNAVALADRLILAMYKEAIKDRITWNSTMREVLFFAVGAAAGSHVILTDEPEPGAPAHKDASLFLSLNRNILLLCTAMCTASHAVSAGLKLEEVMAGLVAGGVQFSLLEVFSPCMASTRFDLAEEEHVLDLLSVIPPRLYTDLNTGFEDDGTTIHSYGRSANGILNSRIAYNFDAVSVFTPELASCSTKLPKVLVVLPIFTNRSYVITRTAPSIGLTYSLDGVNIAKPIVISYITYGNCEVSRATIKSGYLDNPGHTQTCVYCGSVFMRYMVSGAIMDLIYIDDKEVELQLVAGENSTIPAFNPKLYTPSMNALLMFPNGTVTLMSAFASYSSFKVPSTYLWASIGGLLLAILILYIIIKMLCGGVTNDGYKLLLSYE

SEQ ID NO: 47 - DNA, 32 bp, Equine herpesvirus 1
gcgggagcgagggctgctgcggcggcggcgcg

SEQ ID NO: 48 - protein, 530 aa, Equine herpesvirus 1
MDFKYSDTVIHNGVVFYITDGGHRVYFLYGGCLLSVPRPHATAESGEIAKFGLTLRGLTHNDRVVANYVRSELNRTGRHESAPSSEEDVFVDRLEVLAQGAQAFGRDICGSFDLEVYDPYLAECMVSLKVTSGLIVSTGRDIPQDGMLHLYTVPTITNASSGFIYTPNIACFTLVQAYLTELPPELETLISGLFDHIPVARPPLRDESGGHSRTDIIVTSPRAVKTMAIGGTTRCSKRPLRKTVVSDFVQVRLIPKPCSIWDSASRVASGASLQSLQLLFKIADEIILIEEPWPGLDEHLNQARSTIVDAILAVYGNEGKLRFFGGKLTQQGVTTLQRFVLCQFILGKWNLINCYAALEQLAESYIGAVPEARDPLPDPHLVADAVNEIIRESGILGELCEIIVRYTQPTDPVNGSGSEVVELEARLLAEFAANATRVELGLSSYDEVRNMEARIASVLNKLYAKDGIGGAAQVACRILGSGLPVAIVLNVSSITAFDGLDLSRKGAYYLYYLLSERLKRGGVTVHVSRK

SEQ ID NO: 49 - protein, 239 aa, Equine herpesvirus 1
MPQVLMGNTRLHAPLEDGIPLIENDENSSQNEVDLYDYVSMSSYGGDNDFLISSAGGNITPENRPSFSAHVVLFAISALVIKPVCCFIFLNHYVITGSYDFAVAGGVCTVLYYMRLALTAWFMFRNIQSDMLPLNVWQQFVIGCMALGRTVAFMVVSYTTLFIRSELFFSMLAPNAGREYITPIIAHKLMPLISVRSAVCLVIISTAVYAADAICDTIGFTLPRMWMCILMRSSSVKRS

SEQ ID NO: 50 - protein, 1376 aa, Equine herpesvirus 1
MDRRSEAFKIPVPEVIPAGQILSTIEVSSHRTLFDFFKQIRSDDNGLYAAQFDVLLGTYCNTLTLVRFLELGLSVSCVCTKFPELNYVNDGTIQFEVQQPMIARDGPHPVDQPTHTYMMKHIEQRSLSAAFAIAAEALGLIGGTTLDGTQISSSLRVRAIQQLARNVQTVLDSFERGTADQLLRVLLEKAPPLTLLAPLQIYRDEGRLASRVNRAVLVSELKRRVIEDTFFLTKHERNRKELVVARLAELVNCTAPSVAVTRMTHSDTKGRPVDGVVVTTAGVRQRLLQGILTLEDMAADVPVTYGEMMITGTNLVTALVMGKAVRNLDDVAHHLLGMQRDQVRANEKLIKDYEDVPSTARVRADLVLVGDRLVFLEALEKRVYQATNVPYPLVGNLDLTFIIPLGIFKPATDRYSRHAGSFTPTPGQPDPRTYPPQTVYFFNKDGNLVQLSFDSAAGTVCHSSFLDVDSVLVAIRREPHELHCAFGAYVTLPPAGTLLDQMRRFFERWHMLMPARPRWTAEALMTIDQLLSPGNANLRLELHPAFDFFVAPADVVIPGPFDMPNVMPTVMAMPRLINGNIPLPLCPVEFRDSRGFELSVDRHRLNPATVLAVRGAFRDANYPMVFYILEAVIHGSERTFCALARLIIQCIVSYWRNTHQVAFVNNFYMIMYINAYLGNGELPEECTAIYRDLLEHVQALRRLVAEYTVPGEAVGGQGHDALNNVLLDPALLPPLIWDCDPILHRADMGRARAQELWVDGVDYAAIPWVEMAEVNFGNTGGHLVHNRPIRGENKRNPIVPHHDPEWSVLSKIYYYAVVPAFSRGNCCTMGVRYDRVYPLVQTVVIPDLGAEEIAPTSPSDPRHPLNPRHLVPNTLNILFHNARVAVDTDALLLLQEVVTNMAERTTPVLATAAPDAGTATAVTQEMRTFDGTLHHGILMMAYQRNDETLLEGTFFYPAPVNALFACPEHLGALPGLNAEVLEAARDVPPVPHFFGGNYYATVRQPVAQHAVQSRADENTLTYALMAGYFKLGPIALSHQFATGFHPGFAFTVVRQDRFLTENILFAEKASESYFMGQLQVNRHEAVGGVNFVLTQPRANVDLGVGFTAAYAAAALRTPVTDMGNLPQNLYLTRGTIPMLDGDADAYLRRVVNTGNRLGPQGPRPIFGQLMPATPAGVAHGQAAVCEFIVTPVSADLNYFRRPCNPRGRSAGPVYACDGEADAVDVMYDHTQGDPAYPSRATVNPWASQRNSYGDRLYNGKYNLNGASPVYSPCFRFFTPTEVEAKGRNMTQLIADVGASVAPSTSNTEIQFKRPHGSTDLVEDPCSLFQEAYPLLSSTDTALLRTPHIGEIGADEGHFAQYLIRDESPLKGCFPRI

SEQ ID NO: 51 - protein, 314 aa, Equine herpesvirus 1
MASAAFEIDILLPSDLSPADLSALQKCEGKLVFLTALRRRVMLSSVTLSSYYVNGAPPDTLSLMAAFRRRFPAIIQRVLPNKMIAAALGVAPLPPGAFIQNTGPFDLCNGDSVCALPPILDVEDKLRLGSVGEEILFPLTVPLAQARELIARLVARAVQALTPNAQAQRGAEVMFYNGRKYNVTPDLRHRDAVNGVARSLVLNMIFAMNEGSLVLLSLIPNLLTLGTQDGFVNAIIQMGSATREVGQLVHQQPVPQPQDGARRFCVYDALMSWISVASRLGDVVGGKPLVRICTFEGQATISRGEKAPVIQTLL

SEQ ID NO: 52 - protein, 734 aa, Equine herpesvirus 1
MFGRVLGRETVQYFEALRREVQARRGAKNRAAEAQNGGEDDAKTAFLNFAIPTPQRHQTVVPGVGTLHDCCETAQIFASVARRLLFRSLSKWQSGEARERLDPASVEAYVDPKVRQALKTISFVEYSDDEARSCRNAYYSIMNTFDALRSSDAFHQVASFVARFSRLVDTSFNGADLDGDGQQASKRARVDVPTYGKQRGTLELFQKMILMHATYFIAAVILGDHADRIGAFLKMVFNTPEFSDATIRHFRQRATVFLVPRRHGKTWFLVPLIALALATFKGIKIGYTAHIRKATEPVFDEIGARLRQWFGNSPVDHVKGENISFSFPDGSKSTIVFASSHNTNGIRGQDFNLLFVDEANFIRPEAVQTIIGFLNQTNCKIIFVSSTNTGKASTSFLYNLKGAADDLLNVVTYICDEHMERVKAHTNATACSCYILNKPVFITMDGAMRNTAELFLPDSFMQEIIGGGNVSGAHRDEPVFTKTAQDRFLLYRPSTVANQDIMSSDLYVYVDPAFTTNAMASGTGVAVVGRYRSNWVVFGMEHFFLSALTGSSAELIARCVAQCLAQVFAIHKRPFDSVRVAVEGNSSQDAAVAIATNIQLELNTLRRADVVPMPGAVLFYHCTPHGSSVAYPFFLLQKQKTGAFDHFIKAFNSGSVLASQELVSNTVRLQTDPVEYLLTQMKNLTEVVTGTSETRVFTGKRNGASDDMLVALVMAVYLSSLPPTSDAFSSLPAQ

SEQ ID NO: 53 - protein, 706 aa, Equine herpesvirus 1
MDAHIANETKHLLVHGNSKTRALVHIIVPDACLKKAGVDPVKLSDRHRASPSAAPVFRVFAQTRYHATGECSLWRTVFAGYVPSGAIVSALVPTVPADHPRLFQSTPDSGGLFVSLEIECDADGRFDAFTLVALRVDIADDPRTTEVLFTYDELLPPGTRYGADSKRVALLCRQFVAYVNSHPTVSQSAVTAASHIEAAVAEDVKSASGPQVSYGARIDPAEYLFSGGGFDNHQALARLEDDDKEIMSLIRRASEVIAKRNPVRVLSNPEVNGDAHRRQCVASGLRQGARGAHASDSHARVGFNSSIHDATALLLGLEPPDSGRFVNSGPQRHLPPQGPRSPASRDCQSGMLDDVLLLTPENSNPLTPLDWLDVGHAAVAGGDTPRDVWRRRPISLVARKHYGTCETFVVVSYENSTAWGGRRARDGHLAGSINPPVMQACVAAGVDHPRNLPPETRGELIAKFPMLTVPLGDTPPPVAAFDAAAELALIDHFRGACVSALLKAISERLRAEPRMSQLIEYDIPNNNRDCIISVAQRAPELLEAVALAIQNVTVTEFCNSALMLSALSHLNILSGNKRGRLPYHRSWLPSLAGGADAFLFDYYSSGGEVVKVSPVPLAILVTATRTGQHSCRFARGAPDSSSKTYERYLPGECYAYICVGLNRSFEALVVLPGGFACRASAARKLAWPAHLVEPILERYCWTIPSH

SEQ ID NO: 54 - protein, 370 aa, Equine herpesvirus 1
MMAAASDSCLSLWEGSASSPNRQLTPEAVNCLTEALTEDVAVLRLIRSDPRVKIFMAVSVLTPRLARFAPPPPKLTHTAKCAVIMIYLTRPKALALQPKQFHMLVTFNKASVYSLVVRVKTKPFPVGTQRFRAVFQDPESIGLPSDIPDPAAENIPTEINDRLDVSNFATPAQPPKDKYDCCVLAPGVWWSNANKAIYFLQMDVALLALCPAGWKARGLGIILGRLLNHQEGCATCRFTEHSDPLNATADSVATPESCLCWAPCLWRKAHQRELTVEGDRYLFRVLFMDAVERVRLTGLRRSPKITANLADLVVGIGPHGQQIPVNNAGWKLVALDADISRLIVCGCYALRYICPPTNSKHQPSSPDEYA

SEQ ID NO: 55 - protein, 317 aa, Equine herpesvirus 1
MSFSARSRRQRLQLEEAYQREMIFKMHTLDLVREGVNKRSPAFVRAFTSAKEASLDLDRYMQAHSRVGRVEQNARALAQRVEAQAAVGEILDRHRRFLHPDFIDNFDSREDSIVEREERLGDVLSDINCDGGGGEVGDPQEWLGHEDEALLMRWMLEEAPRVSTRIAADPHSPRSTCPAPRKAPEDARCGARKPGEVNNYTPSAQPRSQETTVDHLASPDEGTRLGDRTRDLEHHSTAPMRTHPNVLASERRRLGVVHQREKSSESQESATRSKAIVGQEDQKWLGGIPPLSDEELQVDMGIPTMNGPIYPDYHRTA

SEQ ID NO: 56 - protein, 594 aa, Equine herpesvirus 1
MARSRRRSSVDEMDVGGSATSEYENCGGPSFSPLNLSRPKKSTRGRSLRSAQAWGGKQLHPERSTPLARNDCGPSSKPRRRHEVGRSNKGLGASLDRTDEDTSQCPRIRASAIRCGASTRKIVRITGECDAQQGDSRPGRSEMAGWHSPPKRRRTPSRHGNSDNERSHLPRLSSHGVVRVGGRPLTQTPLQKTIILQPKLVRKVFMPTFTVNPEMHYRRVALGEIPKFGGAGSYGEVQIFKQTGLAIKTASSRSCFEHELAVSLLTGECSLRAQASLGIGGIICLMAFSLPSKQMVFPAYDADLNAYGYRLSRSGPPSVLVTESIERAFIGLGRALVYLNTSCGLTHLDVKGGNIFVNHSHFVISDCVIGDLSLMTLNTNSMAMRAEFEIDTGEEEIKTLRLPRSASQMTFSFVIGHGLNQPISVIADFINNSGLAKSTGPIKHDVGLTIDLYALGQALLELLLVGCISPCLSVPILRTATYYYYSNKLSVDYALDLLAYRCSLYPALFPTTPLTTIYGIPWDQVEGVFESIAGAHHREAFRAHLERYRLTHRRLFASIRIPSAFTGVLELVSLLCHANEKARLSIPLLWTPRP

SEQ ID NO: 57 - protein, 565 aa, Equine herpesvirus 1
MDSSPVTYSGEPPYKLRRLSPSYPYVSKLRERCASKIETLSEGSARDSLEEEDVSEAMATGAFLATRLYLPSVLPQRITTLTFLDHFKKSRPLPNSDKRLNPIFYRLAYIRDLVGEMELEGIVERGTASRLLGASSPAGFVAGTYTHARDLSKTMSLASVRDAVLAIEAQTRDQSESQLWALLRRGLATASTMKWGALGPQYHPQWCEVSTNAKGIPNNPALQFGQTNERTARSLISALYVARSEAATPDLLVDPGCGQCFVFDESASVPGDAYACGLLMDARTGVVGASLDMLVCDRDPSGVLSPHSTQTTLDFFEIKCRAKYLFDPDLFSPVATAYANLLKHRTAVCLRKFLRSIKNPAVEYFASTSVPGATEALITCNSSWKPREVNETNRRCGDFDRDHIALNLDASSDVWLFSEPDLESETITPARWDTGELALSVPVFANPRHPNFKQILVQAYVLSGHFPDHQLRPFLVTFIGRHRKRCEEGKTFTICDRPEGSPYNLNEVVHSSCAIPILLFVTPVIVDREGCWEDIEIESLTAFNKTADAIWDSDSPADVSEPTSS

SEQ ID NO: 58 - protein, 74 aa, Equine herpesvirus 1
MGQRLSCGCFRTDQLVTHSGEVVSLNADTFEEFSMEEFDIPPPPPLPKPVFKQPGPYKIPARSQRCPSKRRDPY

SEQ ID NO: 59 - protein, 450 aa, Equine herpesvirus 1
MARRGAAVAEEPLLPSSGIVGIGPIEGINWRTWLVQVFCFALTTSVLFITLVTASLPQTGYPCFYGSLVDYTQKNHSVVDGVWMRQIAGGVAPTLFLETTSLVAFLYYTTLVLVAISFYLIISAVLVRRYARGKECTAVAGCTRPTTTLIASHVTLVLGTLATWLLQVVILLLSHKQAVLGAAVYVVHFVSLVFFCMSFSGLGTASAQYSSNLRILKTNLPALHKMAGPGRAVMTNLGMGMLGISLPILSLMLGIILANSFHITLWQTVTVAVGVFVALGLMFLIIVELIVSHYVHVLVGPALAVLVASSTLAVATHSYFVHFHAMVSVQAPNLATASKAIVGIMAVISIIMLVVRLVRAIMFHKKRNTEFYGRVKTVSSKARRYVNKVRGPRRNPQPLNVAESRGMLLAEDSETDAEEPIYDVVSEEFETEYYDDPQRVPERSHRREYR

SEQ ID NO: 60 - protein, 887 aa, Equine herpesvirus 1
MPSIGPIPTIPDEGSRGSSATAAPRRAMASYRDTTLGGRAEGVAFSAVEDSYTSSVSLARMLYGGDLEEWVRHTRPGVSLEIQSRAPVRFPPPNNPSSRRVTVVRAPMGSGKTTALLKWLGEALDAPDISALVVSCRRSFTRTLAKRFNDAELPGFATYFTSTDYTMAGEPFRRLLVQIESLHRVDDNLLNNYDILVLDEVMSTIGQLYSPTMVHLNKVDALLTRLLKTCPRVIAMDATANAQLVDFLASARGERSVHVIINSFAAPGFSQRDGTLLRTLGTDVLRAALGFVLVDDENGTKVMETDSRPISARLREVNSAGFFGRLMDRLVAGRNVCVFSSTVSFSEIVARFCSQFTDSILVLNSLRPSEDVAFWGGVRVLIYTTVVTVGLSFDTAHFHSMFAYVKPMSHGPDMVSVYQSLGRVRELIHNELLVYVDSSGARAEPIFTPMLLNHVVSRQGGWPAEFSQVTDALCCQFKARCGPAYRTASTRGLALFVRFKYKHFFERCTLASVGDSINILYTLLESNQMRVAIEGCQFPLTAAGFCDFLQDLRLDAYAARKEIKQLRGPGGIAATPTEVFENDDVAVFIQKYLRPGVAHDEILALLVELNSPIVREQFVNVAVLGACLRLPAALESPEVFAGVYKHYASGVVPVISDAGALESVSITPDVNVLARWDLYKSCTRHARDLAWDPSRGGSGLDMSEDFITNTLSADYNRFQSLLVEIAKCNVTPLEMLAAGAVRGVTTALSGRPKSRVPLSKGEHAVSLFKVLWEDVFGAKLAKSTQTFPGGVRVKNLRKDEIVALLESVNVNHSECKTHRELYALLMCNRKLFAGPRYKLRAPKWSRNLCFLELDNTGTCKTPLDAALADLAPSAWPQVYGAVDFDAL

SEQ ID NO: 61 - protein, 751 aa, Equine herpesvirus 1
MEGSVEWFNGHVCATSIYSLWTDPHHPGHLQALVYMLCRRGSDYTAEFCHVPVSGELLKRGARDASLVTPARVASAAQTAAVPGCWPLAPLGNAMLWKSVYGGITAALKRAVGSFAFYQPLVLGINTQTGLLVTLRPAASAGEGGGDHVSPRAAIVNVSVEVDLDPAGIEASAASSTGSSLARARLCTLRDGYFLSKRDIALEVEIATKEVSFYRKYDSVQQPANKRRGDMADLFVVHERTLLLGGCKRMGVKVLLPRTFDCLVASSQSVSGLAAMALYKQWHATLFSVELPDTVVQIFAYLGPELNPCGEEVDYCCFVGFPGLPTLKASSSTTEAVRDAMAAYRLSDGLWPALGMSAFHFLAPWDPEDRWPGESEAKRVEGAVHRLQLGTEDDWGAGRVSCILESDAVMQGPWFAKFDFSAFFPTLYLLLFPANERLAEVVRLRARGQHPTLKLALVSFFGGLQHINPVAYRSIIALSNGISKRLEHEVNQRGFAICTYVKDGFWGAAGNLPSDSVSYADALVYAEELRSAAQKAALGHVSEMGFSLPEGVHLNLRLEGLFTDAISWSTHCYWLYNRFTKMEDFVGFPAKSGAGRAAKASLSALLPLVAAVCDSSDMSTLHQSVRGACEQLVAGAFAERNNPQFWSTRTGIESSTLLPPAVYRNGSLLDRDCGQREIVLTRKHDCESPSPVPWTLFPPPLVLGRIDCMVYLTSIFKTYLSMLNRAISASCDADESMNVDFPISDYAFLFT

SEQ ID NO: 62 - protein, 303 aa, Equine herpesvirus 1
MSATMRAEIDPLAHSATVDEMVEAITKGDDSVTTIVDDLVWHATPRFVTEVREVPGLPPSFTTTSVTDMRVDASSEKLMLTLDGQEGSEISCETYMRSCLDLPAFKGFSLFVVTPLEDRVNVLGVAPVILSHRLVLYRPTDLIDFTLCIIQMYLENCSTKRATSSLFVQIECILRNISKTITPLLKMRRLMYIGATWTLNTLMCVTNHNPFDQARVLPNYMMAKMLLGQKSNTPAILDAIYSAGYRQTLSKRPITPCPSGVLRCNKAHLNAPLCTKVVADTLYSWWTATDEKPVPESIYVLYD

SEQ ID NO: 63 - protein, 753 aa, Equine herpesvirus 1
MSADSIEPKQKRLRYADANKGRKVERKNTPRFEATTGLQSPGEEEQISADGGWVLIHPTPKTMLFKEILMGELGYTEGQGVYNAIRSTEAAIRQIQTTILTNTLNATRYEDLAKDWQTHLDSRGVSAEEIAATYGMYSEGEAVRVAEQIFATWHRTLQMSLLDFVRSITACFSASEPDGTASFAKYIDWIACLGLIPLQRLKRAPGATVHPKLWRKLPTDVPSLESCVDERDLAGKLYVANSLLREGLEAVVELARCTASVAIMDYDRVNIFYHYTRREVVAIDSTTGKRGECLVLWQPIWKDGSVLFDSPLQRICGEVCNCHALREHAKLCQLLNTVPVKILVGRKKDEAQGPGWASKAVDKLMGEGEELHSSSAASRLVKLIVNMKSMRHIGDITETVRSYLNETSTNLLSGAQVDTSLPGFGQSGKTKQGGNMPVQEAFRTSVINGINGMLEGYVNNLFKTIEDLRTGNSGLLDQLRDRESEITHLREQLLRVSQAAADGSTQPGASSAALPGSGAKSGAGGLGHEVIDIRNLMGDDGYVANSFQSRYIPAYTADMERLSRLWDQELLRCFKMNRITNNQGQEMSVSYSNSSISLLLAPYFFSILRARHLGFLITHQEAYRSEEELCVAVFKKTRLEAYLTELSTLFVARVRNSIAALNSTKRDLPVNDNEAQSDEEQLGKPSDERYYEGRDRSASPQRDRGRNGRGYHKRRRFSNNYRRRSGLARDSSIRDRSQRGSRPTPLLHDHVGH

SEQ ID NO: 64 - protein, 881 aa, Equine herpesvirus 1
MESADILPGSRGTVDRRCEGSEEKITPPRPVEDFNPQLFPNEVYLNFTSMHGIQPVVARIRELSRKTVSAAMVPPLEWFERLPRLETPLDIEPLHLPFSVYLISGNAGSGKSTCIQTLNETMDCVITGATRVAAQNVYTKLSSAFATRHINTIFQEFGFRGNHVQAQLGKYQYSCSSSPPPIEELQKRDIVYYWEVLVDITRRLFESTASRGEFENIRALERLLGRAPGSLTRLAFCTNGSLPAFTRTNIVIIDEAGLLGRHLLTVVVYCWWMLNAAYKSPQYAEGKVPVIVCVGSPTQTDSLESRFEHKNLKCHVRSSENVLTHIITNRTIREYVSLSTNWAIFINNKRCQEYEFGELMKVLEYGLPITEEHMRLVDTFVVPEAYINNPANLPGWTRLYSSHKEVSAYMAKLHAHLKVSGERQFVVFTLPAYTFVKTAAFDEYKKITQQPSLSLDKWLAANASRVSNYSQSRDQDAGKTQCEYYSEHGVVVARTDVTYVLNSQVSVTTRMRKFVFGFSGTFETFDAVLKDDAFIKTQGETSVEYAYRFLSTLLFSGMINFYNFLKRPGLDEGRVREAYRRMAALTAKLIPGASVLESACDNPSGAPLNFRGLTDPPGFTGGTTNDWDDDNDVVFAALNEGAIDMLYCNYEFVRPETTQEVYSQFLMLKTMFVGRYSIFMDLFGGDFESSPFDTFVDNISYKGCEIFVGSMRGGVSSIALQTDSYTLMGYTSAPVYPFVEELARRKLHEGIAELFGAMNMPRMVLRDQHGFMSVLNVNLSEFVESVDDVELDMATAVDYGLSSRLAMTIARSQGLSLDKVAICFPRNNLRINSVYVAMSRTVSSRFLRMNLNPLRERHERDTVISEHILAALRDRDVQIVY

SEQ ID NO: 65 - protein, 225 aa, Equine herpesvirus 1
METCSPPVTFITYALYGIKTSPAWTLPNFEQVICSCDWGYRLIAVGAESKCDVTPQGSFVIQHGASITALVLDCGVEFCSYAFTHAENTRVPLTTEDGSVLVVPFCGWVCVGRDRCLRSMSGGVLTISWDTSQTAYISVAVYRPPTLQCHALDCTRAETTVCSTAAITDASESDPLYADQEGDQTQDQDGGHDFLETILMESDLYGTNGASALLEPCFPCLSNND

SEQ ID NO: 66 - protein, 179 aa, Equine herpesvirus 1
MDVFGRGRAATADDYRRFLERNSRAAAKLAAATTPTHTASSRQQPEVSARPRHRSLSSRRNSVPHYDPHAGAGGDGQLALSERPSGTLGALAMAAQRRKSIGRPDTPVNAAMGSALRSSQRPRGDVRNPRGEGQTQRGGSRGEANHAQRRQSVTQSTAARQTQPHQGRPRPRRNTLRHM

SEQ ID NO: 67 - protein, 212 aa, Equine herpesvirus 1
MESALTVLSGWGWPVEVVTGPVADHLTEMRPPAPTGTTCTTTSTPTPLCVPDLSVESIKGLAPDGENANYVGFDTMFMVSSIDELGRRQLTDTIRKDLRVTLAKFTIACTKTSSFSSASSTRRRKRHCPSSERVMRSNKSLQMFVLCRRAHAKQIRDQLQSVIQARKPRKYYTRSSDGRTHPVVPVYIYEFSAVDKVYLHRDNVIEADAQAK

SEQ ID NO: 68 - protein, 312 aa, Equine herpesvirus 1
MSSACDHETEASHVNIPETTPEENGSNSSTPTSEIGPACVVSPAPGETGAPPPKRRRPCGLPQGVALINTSVSTHPLFTTSCQSSWEDVEREFNIAPSWRPILEREMQQPYVRLLLNEYKLRCASEEVFPPKEDIFAWTRFSPPEKVRVVIVGQDPYHAPGQAHGLAFSVRKGVPVPPSLRNIYSAVQKSYPSFRHPMHGFLERWAEQGVLLINTTLTVARGKPGSHATLGWHRLVRAVIDRLCTTSQGLVFMLWGAHAQKSCSPNRQHHLVLTYGHPSPLSRVNFRDCPHFLEANAYLTKTGRKPVDWQIE

SEQ ID NO: 69 - protein, 218 aa, Equine herpesvirus 1
MYQILIGCVWQKSPYINQCTEFQPPLSFVTPERMRRFMRCWARLELVYMLAWIVTTKLVKATRLDFTWGPGEPKRILEASCGSGPIMKGQLFTSPNIKNLLNRTTGIMVKAHCNPPEAILWVDTPPKPVWVNPFAVVQGLAEDVTNGNMPQDFKEKLLFALDDSLSQSQSSPDEILGPPPLGCFTGPFFLSPPKSKDIAEGLKDSCIPASYYANLQKT

SEQ ID NO: 70 - DNA, 18 bp, Equine herpesvirus 1
gctagcgctaacgctagg

SEQ ID NO: 71 - protein, 532 aa, Equine herpesvirus 1
MATVAERCPICLEDPSNYSMALPCLHAFCYVCITRWIRQNPTCPLCKVPVESVVHTIESDSEFKETKVSVDFDYDSEEDEDSFEGQFLAVDSGDAPANISAWNGPMAFVPLNANGTAGAPRLQPLVDWLVERLDQLFETPELALVMRNIVMDTLCEHGCNEEELTRQFWPMFHEDTVPFVTDLIVQAELCVASRPILPIARGRGVEYIDSSSSSSSSEEETDSDIEVDPNNLTDPEDTSDETSTDNSSAQAPRQEDSRPARARPGPPTRGRRRGRRPAAPGPASRRSARLRRRQPRTNSRTNGGDNGEIIDLTLDSDGDTEPADVSGSLNTTDQPVLIPDEEEAAPASPHTSSNSAIICLVSELTPESEEPPRDQPVAPSGSSAGERPMRPRCSLREFARRFMALAPRDSSTSEAAGPSRLGAGPRATEPFSVAVVLVDRSSEGAGLFGGRFAQHVRRRTEDESARRRGNVLLRPRRQSVPPVPYPDIASTSPLIRQGGQRVRDLQRAFQTQPAEPEEMRCPHNCQRYRRNQ

SEQ ID NO: 72 - DNA, 13 bp, Equine herpesvirus 1
tgccctagccccc

SEQ ID NO: 73 - DNA, 56 bp, Equine herpesvirus 1
aatgacgtcaccggaaggggaggagcaggaaatgacgtaggcggtagtgacgtagg

SEQ ID NO: 74 - DNA, 15 bp, Equine herpesvirus 1
tgacgtaggcggtag

SEQ ID NO: 75 - DNA, 15 bp, Equine herpesvirus 1
ggaaggggaggagca

SEQ ID NO: 76 - DNA, 12 bp, Equine herpesvirus 1
ccatcaacccgc

SEQ ID NO: 77 - protein, 1487 aa, Equine herpesvirus 1
MASQRSDFAPDLYDFIESNDFGEDPLIRAASAAEEGFTQPAAPDLLYGSQNMFGVDDAPLSTPAVVIPPPSPAPEPRGGKAKRSPSAAGSGGPPTPAAAAQPASPAPSPAPGLAAMLKMVHSSVAPGNGRRATGSSSPGGGDAADPVALDSDTETCPGSPQPEFPSSASPGGGSPAPRVRSISISSSSSSSSSMDEDDQADGAGASSSSSSSSDDSDSDEGGEEETPRPRHSQNAAKTPSAAGSPGPSSGGDRPAAGAATPKSCRSGAASPGAPAPAPASAPAPSRPGGGLLPPGARILEYLEGVREANLAKTLERPEPPAGMASPPGRSPHRLPKDQRPKSALAGASKRKRANPRPIPQTQTQAPAEEAPQTAVWDLLDMNSSQATGAAAAAASAPAAASCAPGVYQREPLLTPSGDPWPGSDPPPMGRVRYGGTGDSRDGLWDDPEIVLAASRYAEAQAPVPVFVPEMGDSTKQYNALVRMVFESREAMSWLQNSKLSGQDQNLAQFCQKFIHAPRGHGSFITGSVANPLPHIGDAMAAGNALWALPHAAASVAMSRRYDRTQKSFILQSLRRAYADMAYPRDEAGRPDSLAAVAGYPAQAAAAAASQQQPEAPAPSVRVREAYTRVCAALGPRRKAAAAAAAPGSRAPRPSAFRLRELGDACVLACQAVFEALLRLRGGASAVPGLDPSEIPSPACPPEALCSNPAGLETAALSLYELRDLVERARLLGDSDPTHRLGSDELRLAVRAVLVVARTVAPLVRYNAEGARARASAWTVTQAVFSIPSLVGGMLGEAVSLLAPPTRSQQPSSSSPGGEPFSGSAAAEGSLQTLPPLWPTVPGKQSATVPSSHSQSPQHSQSGGGAGATTATCCRATQTNARSRGQQHQPQKARSPQAAASPAHLSQEAMPGSSSDDRAIHGRPRGKSGKRRSEPLEPAAQAGASASFSSSARGYDPSGPVDSPPAPKRRVATPGHQAPRALGPMPAEGPDRRGGFRRVPRGDCHTPRPSDAACAAYCPPELVAELIDNQLFPEAWRPALTFDPQALATIAARCSGPPARDGARFGELAASGPLRRRAAWMHQIPDPEDVKVVVLYSPLQDEDLLGGLPASRPGGSRREPLWSDLKGGLSALLAALGNRILTKRSHAWAGNWTGAPDVSALNAQGVLLLSTGDLAFTGCVEYLCLRLGSARRKLLVLDAVSTEDWPQDGPAISQYHIYMRAALTPRVACAVRWPRERHLSRAVLTSSTLFGPGLFARAEAAFARLYPDSAPLRLCRSSNVAYTVDTRAGERTRVPLAPREYRQRVLPDYDGCKDMRAQAEGLGFHDPDFEEGAAQSHRAANRWGLGAWLRPVYLACGRRGAGAVEPSELLIPELLSEFCRVALLEPDAEAEPLVLPITEAPRRRAPRVDWEPGFGSRSTSVLHMGATELCLPEPDDELEIDGAGDVELVVEHPGPSPGVAQALRRAPIKIEVVSDDEDGGDWCNPYLS

SEQ ID NO: 78 - DNA, 25 bp, Equine herpesvirus 1
cccagctccggcgaccccggcccag

SEQ ID NO: 79 - protein, 293 aa, Equine herpesvirus 1
MPHGQPCGACDGSCRMAQRGTPSTSPLIPSLTPSPPAGDPSPRSSQRIDAVRVPARLPGGSDHPEYGMPLSPRALRPYLARGPGAFCAPPWRPDVNRLAGDVNRLFRGISTSSIHVTEDSRTLRRALLDFYAMGYTHTRPTLECWQSLLQLLPEQSFPLRATLRALNSEDRYEQRFLEPPSDPPNTLFGEECDVSGDESPSEEEEEDEASGESSVSEFSPEEETASSEYDSFSDVGEDDSSCTGKWSSSESESDSESDAPTNNHHPTTRASAAKKRRKRQPPKGERPTKSARR

SEQ ID NO: 80 - protein, 236 aa, Equine herpesvirus 1
MDGAYGHVHNGSPMAVDGEESGAGTGTGAGADGLYPTSTDTAAHAVSLPRSVGDFAAVVRAVSAEAADALRSGAGPPAEAWPRVYRMFCDMFGRYAASPMPVFHSADPLRRAVGRYLVDLGAAPVETHAELSGRMLFCAYWCCLGHAFACSRPQMYERACARFFETRLGIGETPPADAERYWAALLNMAGAEPELFPRHAAAAAYLRARGRKLPLQLPSAHRTAKTVAVTGQSINF

SEQ ID NO: 81 - DNA, 27 bp, Equine herpesvirus 1
aggccgagcgggggagagcggtagggg

SEQ ID NO: 82 - protein, 272 aa, Equine herpesvirus 1
MNSDMMTAATAGTEVFRCALARRRNANPPHLVLAPTFAAAAAGGAANSSGEEAPRGERKHLFNPFGCMLGRSYFRRCREEMNEGYFAKVPTGYFPVAPSEVPCRVPVEGVVAGEVLSYSALPLPKIEKRFYKQLNDGTFVRLPFLYPEVYYEGEEEPADERYYIRADAADASSADPSTLPEEAFAKVPPAIAEGITNWQGPKRIPIPSERYVMKLGFEYQLHVTEDAFQEVNTSFMRLDLQSSPDPHPRGARQPRSRAHVFAENPEDTPVAV

SEQ ID NO: 83 - protein, 303 aa, Equine herpesvirus 1
MGVVLITVVTVVDRHKALPNSSIDVDGHLWEFLSRQCFVLASEPLGIPIVVRSADLYRFSSSLLTLPKACRPIVRTRGATAIALDRNGVVYHEDRMGVSIEWLSVLSGYNHLNSSLIINQPYHLWVLGAADLCKPVFDLIPGPKRMVYAEIADEFHKSWQPPFVCGKLFETIPWTTVEHNHPLKLRAAGGEDTVVGECGFSKHSSNSLVHPPTVKRVIYAVVDPARLREIPAPGRPLPRRRPSEGGMRAPRWRSRAPAPARSTAAAATPPRPGDPRAPAARRAGDVTWMERLLWGVFGRTSTR

SEQ ID NO: 84 - protein, 382 aa, Equine herpesvirus 1
MENKQCDHLTDWFSTTSDASESMDTTPPLPPPTPSVDPSYSGAAADEDLYSDISEGDLEYSDCDSASESDEDDDDCLIPSKEKAREVAASFGYTVIKTLTPGSEGRVMVATKDGQPEPVVLKIGQKGTTLIEAMMLRNVNHPSVIQMKDTLVSGAITCMVLPHYSSDLYTFLTKESRRIPIDQALIIEKQILEGLRYLHAQRIIHRDVKTENIFINSVDQVCIADFGAAQFPVVEPADLGLAGTVETNAPEVLARAKYNSKADIWSAGIVLFEMLAYPSTLFEDPPSTPEEYVKSCHSQLLKIISTLKINPEEFPRDPGSRLVRGYIEYSRLERKPYTRYPCFQRVNLHIDGEFLVHKMLAFNAAMRPSAEELLSYPMFAQL

SEQ ID NO: 85 - protein, 411 aa, Equine herpesvirus 1
MLTVLAALSLLSLLTSATGRLAPDELCYAEPRRTGSPPNTQPERPPVIFEPPTIAIKAESKGCELILLDPPIDVSYRREDKVNASIAWFFDFGACRMPIAYREYYGCIGNAVPSPETCDAYSFTLIRTEGIVEFTIVNMSLLFQPGIYDSGNFIYSVLLDYHIFTGRVTLEVEKDTNYPCGMIHGLTAYGNINVDETMDNASPHPRAVGCFPEPIDNEAWANVTFTELGIPDPNSFLDDEGDYPNISDCHSWESYTYPNTLRQATGPQTLLVGAVGLRILAQAWKFVGDETYDTIRAEAKNLETHVPSSAAESSLENQSTQEESNSPEVAHLRSVNSDDSTHTGGASNGIQDCDSQLKTVYACLALIGLGTCAMIGLIVYICVLRSKLSSRNFSRAQNVKHRNYQRLEYVA

SEQ ID NO: 86 - protein, 866 aa, Equine herpesvirus 1
MGFIYARKLLLCMAVSIYAIGSTTTTETTTSSSSTSGSGQSTSSGTTNSSSSPTTSPPTTSSSPPTSTHTSSPSSTSTQSSSTAATSSSAPSTASSTTSIPTSTSTETTTTTPTASTTTPTTTTAAPTTAATTTAVTTAASTSAETTTATATATSTPTTTTPTSTTTTTATTTVPTTASTTTDTTTAATTTAATTTAATTTAATTTAATTTAATTTAATTTAATTTAATTTAATTTAATTSSATTAATTSSTTTAATTTAATTTAATTTAATTTAATTTAATTTAATTTAATTTAATTTAATTTAATTTAATTTAATTTAATTTAATTTGSPTSGSTSTTGASTSTPSASTATSATPTSTSTSAAATTSTPTPTSAATSAESTTEAPTSTPTTDTTTPSEATTATTSPESTTVSASTTSATTTAFTTESHTSPDSSTGSTSTAEPSSTFTLTPSTATPSTDQFTGSSASTESDSTDSSTVPTTGTESITESSSTTEASTNLGSSTYESTEALETPDGNTTSGNTTPSPSPRTPSFADTQQTPDNGVSTQHTTINDHTTANAQKHAGHHRGRAGGRRGSPQGGSHTTPHPDRLTPSPDDTYDDDTNHPNGRNNSIEIVPQLPPDRPIIELGVATLRKNFMEASCTVETNSGLAIFWKIGNASVDAFNRGTTHTRLMRNGVPVYALVSTLRVPWLNVIPLTKITCAACPTNLVAGDGVDLNSCTTKSTTIPCPGQQRTHIFFSAKGDRAVCITSELVSQPTITWSVGSDRLRNDGFSQTWYGIQPGVCGILRSEVRIHRTTWRFGSTSKDYLCEVSASDSKTSDYKVLPNAHSTSNFALVAATTLTVTILCLLCCLYCMLTRPRASVY

SEQ ID NO: 87 - DNA, 15 bp, Equine herpesvirus 1
acgaccacggcagca

SEQ ID NO: 88 - DNA, 15 bp, Equine herpesvirus 1
acgaccacagcagca

SEQ ID NO: 89 - DNA, 15 bp, Equine herpesvirus 1
accaccgcggctacc

SEQ ID NO: 90 - protein, 402 aa, Equine herpesvirus 1
MSTFKLMMDGRLVFAMAIAILSVVLSCGTCEKAKRAVRGRQDRPKEFPPPRYNYTILTRYNATALASPFINDQVKNVDLRIVTATRPCEMIALIAKTNIDSILKELAAAQKTYSARLTWFKIMPTCATPIHDVSYMKCNPKLSFAMCDERSDILWQASLITMAAETDDELGLVLAAPAHSASGLYRRVIEIDGRRIYTDFSVTIPSERCPIAFEQNFGNPDRCKTPEQYSRGEVFTRRFLGEFNFPQGEHMTWLKFWFVYDGGNLPVQFYEAQAFARPVPPDNHPGFDSVESEITQNKTDPKPGQADPKPNQPFKWPSIKHLAPRLDEVDEVIEPVTKPPKTSKSNSTFVGISVGLGIAGLVLVGVILYVCLRRKKELKKSAQNGLTRLRSTFKDVKYTQLP

SEQ ID NO: 91 - protein, 424 aa, Equine herpesvirus 1
MAKLTGMFSAAILLSMAICSTAIIYRGEHMSMYLNASSEFAVYPTDQSLVLVGHLLFLDGQRLPTTNYSGLIELIHYNYSSVCYTVIQTISYESCPRVANNAFRSCLHKTSKHYHDYFRVNVSVETNVLLNITKPQPTDSGAYILRVKLDHAPTADVFGVSAFVYDLKSKTVPDPMPTTQTVEPTTSYVSTPTYDYTDDVTTETESTSTSTQQAMTSTQTPSATWGTQLTTELPTNETVVIGQEALLCHWFQPSTRVPTLYLHLLGRTGNLPEDVLLVEDSEFLRTTSPAHRPSASPADGDDFKQTNSTSLKARNKIVAMVVIPTACVLMLLLVVVGAIINGAVRKHLLSCASRRIYRSGQGGASAAERRRLTCGPTLAASSESLADDTTSSPPTPKPSKKTKLETDPLMEQLNRKLEAIKEES

SEQ ID NO: 92 - protein, 550 aa, Equine herpesvirus 1
MELLAASRACIFFGLVTVLDAWGVQQVELSEGAWAMIDGRDVLTPTNTTTRVTKAWTFLETPPGCAGDISVKKVCVSHSLCEDNIIIGKHCNLLTGEHGIALAEFNVVNGSLRRTDDVYFVNGTVFPILAETRSVLQIHRATPSIAGVYTLHVSIDGMMKHSVVLLTVKKPPKQPQPRLRVKTPPPVTVPQVPVKTHTDFVVHGYHSRVYADGESFELSVNLESHIVEPSFSAEIQWYYMNTSSSSCDLFRVFETCIFHPTAMACLHPEQHTCSFTSPIRATKILHRVYGNCSDHGNSWPSRCHSTLLGNRLYFIQPAQNRVDLLFKDTPASATGLYVFVLLYNGHPEAWTYTLLSTANHFMNVLTDVTRPRLGEHFYTDLGHKIITPHPSVATTEELGAWTRHYLAFLLVIICTCAALLVALVVWGCILYIRSNRKPYEVLNPFETVYTSVPSNDPSDEVLVFERLASDSDDSFDSDSDEELEYPPPPKPAPQLPPYQFVDGGDAPSGRSGFKVWFRDTPEASPVPLHKPTLQGPDYSRVASKLKSILK

SEQ ID NO: 93 - protein, 130 aa, Equine herpesvirus 1
MSSNSDNTECFGGVNYAEGMRKRKRNPVRNSTFQEYLDARNARYPRSGSTSDSDEDYTTRSKYESDVSEFKKMMDLETLPPPKAEPQAQKAEPDAAKEEPVSTTSYILNEWVAPMIGHFLAMCMYELLFK

SEQ ID NO: 94 - protein, 219 aa, Equine herpesvirus 1
MEKAEAAAVVIPLSVSNPSYRGSGMSDQEVSEEQSAGDAWVSAAMAAAEAVAAAATSTGIDNTNDYTYTAASENGDPGFTLGDNTYGPNGAASGCPSPPSPEVVGLEMVVVSSLAPEIAAAVPADTISASAAAPATRVDDGNAPLLGPGQAQDYDSESGCYYSESDNETASMFIRRVGRRQARRHRRRRVALTVAGVILVVVLCAISGIVGAFLARVFP

SEQ ID NO: 95 - protein, 272 aa, Equine herpesvirus 1; identical to SEQ ID NO: 82

SEQ ID NO: 96 - DNA, 27 bp, Equine herpesvirus 1
cccctaccgctctcccccgctcggcct

SEQ ID NO: 97 - protein, 236 aa, Equine herpesvirus 1; identical to SEQ ID NO: 80

SEQ ID NO: 98 - protein, 293 aa, Equine herpesvirus 1; identical to SEQ ID NO: 79

SEQ ID NO: 99 - DNA, 25 bp, Equine herpesvirus 1
ctgggccggggtcgccggagctggg

SEQ ID NO: 100 - protein, 1487 aa, Equine herpesvirus 1; identical to SEQ ID NO: 77

SEQ ID NO: 101 - DNA, 12 bp, Equine herpesvirus 1
gcgggttgatgg

SEQ ID NO: 102 - DNA, 15 bp, Equine herpesvirus 1
tgctcctccccttcc

SEQ ID NO: 103 - DNA, 15 bp, Equine herpesvirus 1
ctaccgcctacgtca

SEQ ID NO: 104 - DNA, 56 bp, Equine herpesvirus 1
cctacgtcactaccgcctacgtcatttcctgctcctccccttccggtgacgtcatt

SEQ ID NO: 105 - DNA, 20 bp, Artificial sequence
  Amplification primer
aattattggtgggcagaacc

SEQ ID NO: 106 - DNA, 18 bp, Artificial sequence
  Amplification primer
ttctccagcacagcaacg

SEQ ID NO: 107 - DNA, 22 bp, Artificial sequence
  Amplification primer
ctgtaacgatgctaacgctacg

SEQ ID NO: 108 - DNA, 21 bp, Artificial sequence
  Amplification primer
ttcagaaacctgtccaggtcc

SEQ ID NO: 109 - DNA, 18 bp, Artificial sequence
  Amplification primer
ccccaactctaaaactcg

SEQ ID NO: 110 - DNA, 21 bp, Artificial sequence
  Amplification primer
aatgtaccatacacaacctcc

SEQ ID NO: 111 - DNA, 20 bp, Artificial sequence
  Amplification primer
caaagcgcaaagcaaaatgc

SEQ ID NO: 112 - DNA, 22 bp, Artificial sequence
  Amplification primer
gggccttgtagatcagctctcc

SEQ ID NO: 113 - DNA, 18 bp, Artificial sequence
  Amplification primer
gcgctacttctgaaaacg

SEQ ID NO: 114 - DNA, 20 bp, Artificial sequence
  Amplification primer
ccacaaacttgataaacacg

SEQ ID NO: 115 - DNA, 19 bp, Artificial sequence
  Amplification primer
aaaccacaagccttactcc

SEQ ID NO: 116 - DNA, 18 bp, Artificial sequence
  Amplification primer
gcgcaactatcacatacg

SEQ ID NO: 117 - DNA, 19 bp, Artificial sequence
  Amplification primer
tcaaggaggaactagctcg

SEQ ID NO: 118 - DNA, 19 bp, Artificial sequence
  Amplification primer
ccaaaaagcaacaaacagg

SEQ ID NO: 119 - DNA, 18 bp, Artificial sequence
  Amplification primer
ttttacgacatcgacagc

SEQ ID NO: 120 - DNA, 20 bp, Artificial sequence
  Amplification primer
gaggtcacactttgagtacg

SEQ ID NO: 121 - DNA, 20 bp, Artificial sequence
  Amplification primer
attctccacgcggtatctcc

SEQ ID NO: 122 - DNA, 21 bp, Artificial sequence
  Amplification primer
atgtcaagcgccatagaaacg

SEQ ID NO: 123 - DNA, 18 bp, Artificial sequence
  Amplification primer
acatactccgccatctcc

SEQ ID NO: 124 - DNA, 19 bp, Artificial sequence
  Amplification primer
acagctacatgactcgtgc

SEQ ID NO: 125 - DNA, 18 bp, Artificial sequence
  Amplification primer
ttacgtactcagcgatgg

SEQ ID NO: 126 - DNA, 18 bp, Artificial sequence
  Amplification primer
gggatagaaatagcgagg

SEQ ID NO: 127 - DNA, 18 bp, Artificial sequence
  Amplification primer
atcacaaacgcatcctcg

SEQ ID NO: 128 - DNA, 20 bp, Artificial sequence
  Amplification primer
cacagctcacccaaaatacc

SEQ ID NO: 129 - DNA, 20 bp, Artificial sequence
  Amplification primer
ccaacagctttcacatcacc

SEQ ID NO: 130 - DNA, 19 bp, Artificial sequence
  Amplification primer
ttcaaattcctcgctcacc

SEQ ID NO: 131 - DNA, 18 bp, Artificial sequence
  Amplification primer
caaaactccaacaccacg

SEQ ID NO: 132 - DNA, 22 bp, Artificial sequence
  Amplification primer
gagaagaggttctacaagcagc

SEQ ID NO: 133 - DNA, 19 bp, Artificial sequence
  Amplification primer
agcattgccaaacagttcc

SEQ ID NO: 134 - DNA, 20 bp, Artificial sequence
  Amplification primer
caagaaaccactgctcaacc

SEQ ID NO: 135 - DNA, 19 bp, Artificial sequence
  Amplification primer
gaacatatgagcatgtacc

SEQ ID NO: 136 - DNA, 19 bp, Artificial sequence
  Amplification primer
gaccagtagaacatcttcc

SEQ ID NO: 137 - DNA, 19 bp, Artificial sequence
  Sequencing primer
ccatcaccacgctattctc

SEQ ID NO: 138 - DNA, 20 bp, Artificial sequence
  Sequencing primer
tagcccaaacgacgacaaag

SEQ ID NO: 139 - DNA, 18 bp, Artificial sequence
  Sequencing primer
tttacaccaatccactcc

SEQ ID NO: 140 - DNA, 19 bp, Artificial sequence
  Sequencing primer
atccaacacacgcaacatc

SEQ ID NO: 141 - DNA, 18 bp, Artificial sequence
  Sequencing primer
tacccaagcattatccag

SEQ ID NO: 142 - DNA, 19 bp, Artificial sequence
  Sequencing primer
gagaagacctttcagcgac

SEQ ID NO: 143 - DNA, 18 bp, Artificial sequence
  Sequencing primer
gtattctcctcggttttc

SEQ ID NO: 144 - DNA, 20 bp, Artificial sequence
  Sequencing primer
acaaagccaaaacttcctac

SEQ ID NO: 145 - DNA, 20 bp, Artificial sequence
  Sequencing primer
cgatgtagacggaccagaag

SEQ ID NO: 146 - DNA, 18 bp, Artificial sequence
  Sequencing primer
ccatctataacgccagcc

SEQ ID NO: 147 - DNA, 18 bp, Artificial sequence
  Sequencing primer
taagagcacggatgtaag

SEQ ID NO: 148 - DNA, 19 bp, Artificial sequence
  Sequencing primer
actcgccgaatcccagatg

SEQ ID NO: 149 - DNA, 18 bp, Artificial sequence
  Sequencing primer
gctacttcgttcacttcc

SEQ ID NO: 150 - DNA, 18 bp, Artificial sequence
  Sequencing primer
gaagaagcattcgccaag

SEQ ID NO: 151 - DNA, 20 bp, Artificial sequence
  Sequencing primer
gaagatagaatgggtgtgag

SEQ ID NO: 152 - DNA, 19 bp, Artificial sequence
  Sequencing primer
aaaccactgctcaacccac

SEQ ID NO: 153 - DNA, 20 bp, Artificial sequence
  Sequencing primer
accgttgagcataatcatcc

SEQ ID NO: 154 - DNA, 19 bp, Artificial sequence
  Sequencing primer
acggacaacgcttacccac

SEQ ID NO: 155 - DNA, 3663 bp, Equine herpesvirus 1
atggcggcgcgcgaacaggccaactccgttcgcaggagcgggttttttaatccgtttattggcaagaggccatttttcaggccgggaagcgggcagaccgcggagacagagcgcccaaggcccccccaacactcgtactgcacagaggtgggtagctttaagtttatagctccaagatgcctcgatgaagaagcccccgccgaccagcgacgcggtgtacacgtgggcaccttggagcgcccacccaaagtgtactgcgatggctcagagtacgacgtgctgaactttgcctccggaggttgctggcctcgcaggattcgggtttggaacggccaggattttcggggcgatggattcaaccccagatttgagagatttcacgtgtacgacatagtagagacttcggagagcgcctcacacgatgacccatccaggtttgctgagctatcccgcccaagcgggtctgtggtaacactgctgggaatgagcgagtgtggaaagcgagtcgcggttcacgtctatggtgtgcgccattatttttacatggcaaaggcggaggtggatagcgcttgtggaataaccaccgaggcagaactcgtgcgcgcaatggtggactgcgcgcacagctcggctttgagcgcggccctgggaaatggcaacggcggcaaacagagcggcggcagcggcgggggatggtggggcggaaagcacgtgtctgcggactgcttcaaagtggagaccgtgtgccacacgacgctgtactactttggatctaagccagctctctactatagagtatctgcctccagcagccgcctgggagggttcatctgcgacaactttcacccggagattacaaaattcgaggggagcgtggacgtgaccacgcggctgttgttggacaatgaaaattttaccagttttgggtggtaccgcctgcgacccggcacccacggagagcgtgttcaacttcgccccgttgagcgacacgtcacctcaagcgacgtggagattaactgtactcccgataacctggagccgataccagacgaggctgcctggcccgactataagctcatgtgctttgatatagagtgtaaagctggaacgggtaacgaaatggcgttcccagtggcaactaaccaagaggacctggtcatccagatctcctgtctgctgtactcgcttgctactcagaaccacgaacacaccctgctgttttccctcgggtcatgcgatatctctgaggaatactcgtttgcatgcgtccagcgcggcgagcccagaccgacggttttggagtttgacagcgagtacgagctgctggttgccttcctgacctttctcaagcagtactctcccgagttcgccaccggctacaacatcgttaattttgactgggcgtacatagttaacaaggtaacgtcggtgtataacatcaagctggacgggtacggcaagttcaacaaaggggggctgtttaaggtgtgggacatcgccacgaaccattttcagaagaagagcaaggtgaaaatcaatggcctgatatctctagacatgtattctgtggcgacggaaaagctaaagctacccagctacaaactcgacgcggtcgtgggagacgtcctcggcgagcataagatagaccttccctataaagaaataccctcctattacgcgggagggcctgaccggaggggcgtaataggagagtattgtatccaggactctaggctggtgggcaagctgttttttaagtacctcccccatctggaactatcggcggtggccaaactcgcccgtatcaccctaacgcgggtaatttttgacggtcagcaaattcgcgtgtacacgtgcttgctgaaactcgcccgcgagagaaatttcattttgccagacaacagacgccggtttgacagtcaggcagacgccgcgtcagagacttcggagttggctatggatagccaaagccacgccttcgacagtacagacgaacccgacggtgtggacggtaccccggacgccgcaggatctggcgctacttctgaaaacggaggcgggaagcccggcgtcgggagggccgtgggctaccagggagcaaaggttctagaccccgtatccggctttcatgtggaccccgtggttgtgtttgacttcgctagcttatacccaagcattatccaggcccataacctctgtttcaccaccctggcgctcgatgaagtggatctggccgggcttcaaccatccgtcaactactcgacgttcgaggtgggtgaccaaaagttattttttgtccacgcccatattcgcgaaagcctgcttggcatcttgctgcgcgactggctggccatgcgaaaggcggtgagggcgcgaatccccaccagcacccccgaggaggcagttttactagataagcagcagtctgcgattaaggtgatatgcaactcggtttacggattcacgggggtggcaaacggcctgttgccgtgtctgaggatagcggctaccgttaccacgataggacgcgacatgctcctcaagacccgagattacgttcactctcgttgggcgacgcgcgagctgctggaggacaattttccaggggctataggtttccgaaaccacaagccttactccgtcagggttatctacggagacaccgactccgtgtttatcaagtttgtgggcctgacgtacgagggggtatcggagctgggggatgctatgtcgcgtcagatttcagcggacctctttagagcgcccatcaaactggagtgtgagaagacctttcagcgactgctgctgatcaccaagaagaagtacataggtgtcataaacggggggaagatgctcatgaagggggtcgacctggtccgcaaaaataactgctctttcataaacttgtacgcgcgacatctggtagatcttttgttgtacgacgaggatgtggccacggcggcagcaaaggtgacagacgtgcctcccgcagaatgggtggggcgcccgctaccgagcggctttgacaagtttgggcgagtgctggtagaggcgtacaaccgtatcactgcccccaacttggacgtgcgcgagttcgttatgactgctgagctgagccgctcacccgaatcgtataccaacaagcgcctgccgcacctcaccgtctactttaagctcgccatgaggaatgaagaactgcccagcgtaaaagagagaattccgtatgtgatagttgcgcagaccgaggccgcggaacgcgaagcgggtgtagtaaactcaatgcgcggtaccgcccaaaaccccgtggtaaccaagaccgcacgcccccaacctaaacgcaaactgctggtttccgacctcgccgaagacccgacctatgtttccgagaatgacgtaccgctaaacacagactactatttctcccacctgttgggtaccataagcgtgacctttaaggctctattcggaaatgatgtgagaacaacagaaaatcttttaaagcggtttattccggaaaccccccacaagacccccacgaaaacccaggcactgcttgagcgcgccggctttgaaaagctgacgccctttacaccggaggaagaaagtcgtcgaatactgcatacagttttttgtactctagaagcagctccccatcaaagctga

SEQ ID NO: 156 - protein, 1220 aa, Equine herpesvirus 1; identical to SEQ ID NO: 36

SEQ ID NO: 157 - protein, 42 aa, Equine herpesvirus 1
PTLPPAPPLPQSTSKAASGPPPTLPPAPPLPQSTSKAASGPP

SEQ ID NO: 158 - protein, 8 aa, Equine herpesvirus 1
AKDQAKDQ

SEQ ID NO: 159 - protein, 15 aa, Equine herpesvirus 1
PTGAVPENTPLPDDS

SEQ ID NO: 160 - protein, 69 aa, Equine herpesvirus 1
TAATTTAATTSSATTAATTSSTTTAATTTAATTTAATTTAATTTAATTTAATTTAATTTAATTTAATTT

SEQ ID NO: 161 - protein, 38 aa, Equine herpesvirus 1
ALDEVDLAGLQPSVNYSTFEVGDQKLFFVHAHIRESLL

SEQ ID NO: 162 - protein, 38 aa, Equine herpesvirus 1
ALDEVDLAGLQPSVDYSTFEVGDQKLFFVHAHIRESLL

SEQ ID NO: 163 - protein, 38 aa, Equine herpesvirus 4
ALNEVDLAGLQPCVDYSTFEVGDQKLFFVHAHIRESLL

SEQ ID NO: 164 - protein, 38 aa, BHV-1
VRREAAPAGLTPGADYATFDVGGRALHFVRAHVRESLL

SEQ ID NO: 165 - protein, 38 aa, BHV-2
ALDAEAVGGLEAGRDYMEITVGGDTVYFVKAHVRESLL

SEQ ID NO: 166 - protein, 38 aa, FeHV-1
TTERQSLETLRPGIDFSEFDVGGHKLYFVDSHVREEPA

SEQ ID NO: 167 - protein, 37 aa, VZV
TLNFETVKRLNPSDYATFTVGGKRLFFVRSNVRESLL

SEQ ID NO: 168 - protein, 37 aa, SimVZV
AFDIESVKHLGSNDYSVFNVGGQQLFFVHAHIRESLL

SEQ ID NO: 169 - protein, 35 aa, PRV
ALARPAGLREDEFSAFEVNGERLYFVHAGVRESLL

SEQ ID NO: 170 - protein, 38 aa, HSV-1
SLRADAVAHLEAGKDYLEIEVGGRRLFFVKAHVRESLL

SEQ ID NO: 171 - protein, 38 aa, HSV-2
SLRPEAVAHLEADRDYLEIEVGGRRLFFVKAHVRESLL

SEQ ID NO: 172 - protein, 38 aa, MDV-1
VHDDTNLSNLRPQDDYLEINVQGKLLRFVKPHIRESLL

SEQ ID NO: 173 - protein, 38 aa, MDV-2
INDDRKLADLRPRDDYMEIDVQGKSLHFAKPHIRESLL

SEQ ID NO: 174 - protein, 38 aa, HVT
LPAGTIINDLRRGDDYIEIDVQGSILRFVKPHIRESLL

SEQ ID NO: 175 - protein, 37 aa, HCMV
LVPGGEYPVDPADVYSVTLENGVTHRFVRASVRVSVL

SEQ ID NO: 176 - protein, 35 aa, MCMV
LVEGSPEVPEKDVLRVEIGDQCHRFVRENVHRSLL

SEQ ID NO: 177 - protein, 36 aa, RCMV
LVDGSPPVPDEDVLEVVVGEATRYRFVREHVRRSLL

SEQ ID NO: 178 - protein, 38 aa, PorcCMV
ILNDEDVTGIDEKDILTVHVNKNTVYRFVRSGVRESML

SEQ ID NO: 179 - protein, 36 aa, RhCMV
VAPGGESPPESDVLTVELESGLSYRFVKNTVRNSVL

SEQ ID NO: 180 - protein, 37 aa, GPCMV
LPLGRDDGLSDDDVFLLEFDDGTRYGFVREHVRKSIL

SEQ ID NO: 181 - protein, 37 aa, ElephHV-1
ITDNYVASLREEDITMVTTNTGRVHRFVKPHVRKSIL

SEQ ID NO: 182 - protein, 37 aa, HHV-6
VLDERQIAGLSESDILTVKLGDETHRFVKPCIRESVL

SEQ ID NO: 183 - protein, 37 aa, HHV-7
VVDENAVIGLHADDILTVHVGPVTHRFVKKTVRESIL

SEQ ID NO: 184 - protein, 40 aa, EBV
ITPGEEHRLAGLRPGEDYESFRLTGGVYHFVKKHVHESFL

SEQ ID NO: 185 - protein, 40 aa, CalliHV3
VTPGEEGKLRDLRPGEDYESFSLSGGTFHFVKKHIHKSFL

SEQ ID NO: 186 - protein, 38 aa, BHV-4
IQDQNLHLHHLKPDDYETFHLSTGPIHFVKQHKTKSLL

SEQ ID NO: 187 - protein, 39 aa, AlHV-1
IKQQDLPKFTNLTANDYETFMISGGPVHFVKKHKTESLL

SEQ ID NO: 188 - protein, 39 aa, MHV-68
IPDNKLQMFPNLTPADYETFTLPSGTVHFVKKHKKCSLL

SEQ ID NO: 189 - protein, 39 aa, HVS
IPHHALHNYPHLKSSDYETFMLSSGPIHFVKKHIQASLL

SEQ ID NO: 190 - protein, 39 aa, AtelHV3
IPHNSLHNYPYLKSSDYETFMLSSGPIHFVKKHIQTSLL

SEQ ID NO: 191 - protein, 39 aa, HHV-8
IPGDSLHLHPHLSPDDYETFVLSGGPVHFVKKHKRESLL

SEQ ID NO: 192 - protein, 39 aa, PorcLTHV-1
IHHEDLHKYPQLKEEDYETFLISSGPVHFVKKHISESLL

SEQ ID NO: 193 - protein, 39 aa, EHV-2
IPGDRLCLHPHLGPGDYETFELASGPVHFVKKHKAVSLL

SEQ ID NO: 194 - protein, 38 aa, GTHV
TRRAETLKELKAGEDYEEFKVQGMSLFYVKPHVRRSLL

SEQ ID NO: 195 - protein, 38 aa, TortHV
TRNPESLKDLKAGKDYVSFNVQGHTLYYVLNHVKQSLL

SEQ ID NO: 196 - protein, 38 aa, CCV
DSDKTNRVGDYMGYDWSKIDQGFEKFTLVLRVDRTDPE

SEQ ID NO: 197 - protein, 38 aa, RanHV-1
DVRRVAQFRGWIVFDWRQIEEGFGLASLMYTPSKRRFL

SEQ ID NO: 198 - DNA, 10 bp, Equine herpesvirus 1
cgtctctcgg

SEQ ID NO: 199 - DNA, 10 bp, Equine herpesvirus 1
cgtctctcga

SEQ ID NO: 200 - DNA, 10 bp, Equine herpesvirus 1
agagtcagtg

SEQ ID NO: 201 - DNA, 10 bp, Equine herpesvirus 1
agagtaagtg

SEQ ID NO: 202 - DNA, 70 bp, Equine herpesvirus 1
tgcgccccagccgtgccgggcgttcccgcgtgagagtggaagaccaaactctggaaccatcgtcccccgc

SEQ ID NO: 203 - DNA, 70 bp, Equine herpesvirus 1
tgcgccccagccgtgccgggcgttcccgcgtgaaagtggaagaccaaactctggaaccatcgtcccccgc

SEQ ID NO: 204 - DNA, 70 bp, Equine herpesvirus 1
tgcgccccagccgtgccgggcgttcccgcgtgacagtggaagaccaaactctggaaccatcgtcccccgc

SEQ ID NO: 205 - DNA, 79 bp, Equine herpesvirus 1
tgcgccccagccgccccagccgtgccgggcgttcccgcgtgagagtggaagaccaaactctggaaccatcgtcccccgc

SEQ ID NO: 206 - DNA, 79 bp, Equine herpesvirus 1
tgcgccccagccgccccagccgtgccgggcgttcccgcgtgaaagtggaagaccaaactctggaaccatcgtcccccgc

SEQ ID NO: 207 - DNA, 79 bp, Equine herpesvirus 1
tgcgccccagccgccccagccgtgccgggcgttcccgcgtgagagtggaagaccaaactctggaaccatcgtcccccac

SEQ ID NO: 208 - DNA, 78 bp, Equine herpesvirus 1
tgcgcccagccgccccagccgtgccgggcgttcccgcgtgagagtggaagaccaaactctggaaccatcgtcccccgc

SEQ ID NO: 209 - DNA, 10 bp, Equine herpesvirus 1
aacctcgatg

SEQ ID NO: 210 - DNA, 10 bp, Equine herpesvirus 1
aacctcaatg

SEQ ID NO: 211 - DNA, 60 bp, Equine herpesvirus 1
gtcgactactcgacgttcgaggtgggtgaccaaaagttattttttgtccacgcccatatt

SEQ ID NO: 212 - DNA, 60 bp, Equine herpesvirus 1
gtcgactcctcgacgttcgaggtgggtgaccaaaagttattttttgtccacgcccatatt

SEQ ID NO: 213 - DNA, 60 bp, Equine herpesvirus 1
gtcaactactcgacgttcgaggtgggtgaccaaaagttattttttgtccacgcccatatt

SEQ ID NO: 214 - DNA, 60 bp, Equine herpesvirus 1
gtcaactactcgacgttcgaggtgggtgaccaaaagttattttttgtccacgccaatatt

SEQ ID NO: 215 - DNA, 60 bp, Equine herpesvirus 1
gtcaactactcgacgttcgaggtgggtggccaaaagttattttttgtccacgcccatatt

SEQ ID NO: 216 - DNA, 10 bp, Equine herpesvirus 1
ggcagcagag

SEQ ID NO: 217 - DNA, 10 bp, Equine herpesvirus 1
ggcagcaaag

SEQ ID NO: 218 - DNA, 10 bp, Equine herpesvirus 1
gcaattggcg

SEQ ID NO: 219 - DNA, 10 bp, Equine herpesvirus 1
gccattggcg

SEQ ID NO: 220 - DNA, 10 bp, Equine herpesvirus 1
tggaaaatga

SEQ ID NO: 221 - DNA, 10 bp, Equine herpesvirus 1
tggaagatga

SEQ ID NO: 222 - DNA, 10 bp, Equine herpesvirus 1
caacagacaa

SEQ ID NO: 223 - DNA, 10 bp, Equine herpesvirus 1
caacatacaa

SEQ ID NO: 224 - DNA, 10 bp, Equine herpesvirus 1
cggacgatct

SEQ ID NO: 225 - DNA, 10 bp, Equine herpesvirus 1
cggacggtct

SEQ ID NO: 226 - DNA, 10 bp, Equine herpesvirus 1
gcctgccggg

SEQ ID NO: 227 - DNA, 10 bp, Equine herpesvirus 1
gcatgccggg

SEQ ID NO: 228 - DNA, 10 bp, Equine herpesvirus 1
gcctgctggg

SEQ ID NO: 229 - DNA, 70 bp, Equine herpesvirus 1
gggcggcgtcccttttttccccaaaataaaagccggtgcaattaaagacgagtgccccttttttgtcggc

SEQ ID NO: 230 - DNA, 71 bp, Equine herpesvirus 1
gggcggcgtcccttttttccccaaaataaaagccggtgcaattaaagacgagtgcccctttttttgtcggc

SEQ ID NO: 231 - DNA, 70 bp, Equine herpesvirus 1
gggtggcgtcccttttttccccaaaataaaagccggtgcaattaaagacgagtgccccttttttgtcggc

SEQ ID NO: 232 - DNA, 10 bp, Equine herpesvirus 1
aatagtgtca

SEQ ID NO: 233 - DNA, 10 bp, Equine herpesvirus 1
aatagtgtta

SEQ ID NO: 234 - DNA, 10 bp, Equine herpesvirus 1
cccgagccag

SEQ ID NO: 235 - DNA, 10 bp, Equine herpesvirus 1
cccgagcccg

SEQ ID NO: 236 - DNA, 10 bp, Equine herpesvirus 1
tctacacccc

SEQ ID NO: 237 - DNA, 10 bp, Equine herpesvirus 1
tctacactcc

SEQ ID NO: 238 - DNA, 10 bp, Equine herpesvirus 1
ttgatcgtat

SEQ ID NO: 239 - DNA, 10 bp, Equine herpesvirus 1
ttgatcatat

SEQ ID NO: 240 - DNA, 10 bp, Equine herpesvirus 1
gatacgccaa

SEQ ID NO: 241 - DNA, 10 bp, Equine herpesvirus 1
gatacgtcaa

SEQ ID NO: 242 - DNA, 10 bp, Equine herpesvirus 1
gccaggcagc

SEQ ID NO: 243 - DNA, 10 bp, Equine herpesvirus 1
gccaggcaac

SEQ ID NO: 244 - DNA, 10 bp, Equine herpesvirus 1
tctgcagaaa

SEQ ID NO: 245 - DNA, 10 bp, Equine herpesvirus 1
tttgcagaaa

SEQ ID NO: 246 - DNA, 20 bp, Equine herpesvirus 1
catctcaactccagccttat

SEQ ID NO: 247 - DNA, 20 bp, Equine herpesvirus 1
catctcaactccaaccttat

SEQ ID NO: 248 - DNA, 20 bp, Equine herpesvirus 1
catcttaactccagccttat

SEQ ID NO: 249 - DNA, 10 bp, Equine herpesvirus 1
attagttcgt

SEQ ID NO: 250 - DNA, 10 bp, Equine herpesvirus 1
attagttcat

SEQ ID NO: 251 - DNA, 60 bp, Equine herpesvirus 1
ggcggccgctgccgcggcggcggccgtcggaggggggggatgcgcgccccgaggcggcgc

SEQ ID NO: 252 - DNA, 61 bp, Equine herpesvirus 1
ggcggccgctgccgcggcggcggccgtcggagggggggggatgcgcgccccgaggcggcgc

SEQ ID NO: 253 - DNA, 60 bp, Equine herpesvirus 1
ggcggccgccgccgcggcggcggccgtcggaggggggggatgcgcgccccgaggcggcgc

SEQ ID NO: 254 - DNA, 60 bp, Equine herpesvirus 1
ggcggccgctgccgcggctgcggccgtcggaggggggggatgcgcgccccgaggcggcgc

SEQ ID NO: 255 - DNA, 60 bp, Equine herpesvirus 1
ggcggccgcagccgcggctgcggccgtcggaggggggggatgcgcgccccgaggcggcgc

SEQ ID NO: 256 - DNA, 60 bp, Equine herpesvirus 1
ggcggccgctgccgcggcggcggccgtcggaggggggggatgcgcgccccgaggtggcgc

SEQ ID NO: 257 - DNA, 60 bp, Equine herpesvirus 1
ggcggccgcggcagcggcggcggccgtcggaggggggggatgcgcgccccgaggcggcgc

SEQ ID NO: 258 - DNA, 10 bp, Equine herpesvirus 1
caatgcctct

SEQ ID NO: 259 - DNA, 10 bp, Equine herpesvirus 1
caatgtctct
